United States Patent Application Publication US 2008/0066199 A1 - sequence listing, part 7

SEQ ID NO: 47083 - DNA, 247 bp, Glycine max
  Clone ID: 701038669H1
acgttttccgatcctctttctcgtcgccaccctcatcaccctcgcctccggtgcacgccacgatattctccggttaccctccgaagcttccaggttcttcaaagcacctgctaatgccgatcaaaacgatgagggcaccaggtgggccgttttagttgccggttccaatggctactggaattacaggcaccagtctgatgtttgccatgcatatcaactactgaggaaaggtggtgtgaaagaggaa

SEQ ID NO: 47084 - DNA, 249 bp, Glycine max
  Clone ID: 701038670H1
tcatcacaacaaaaagaaagaaagaaacaaagatcgttcattgctttgtagtaagatcagatcatcaaaaatggttttgtcttggtcaagaaggaacgttttccgccgtgccaagaaggagaagtcacaaactcaattggaagtggaggttgtgattcccaaccactttcactgcccggtgagtctggagctgatgacagacccagtgactttatcaaccggcatcacctacgaccgtgtgagcattga

SEQ ID NO: 47085 - DNA, 247 bp, Glycine max
  Clone ID: 701038672H1
actgacatcagggttggaatcccagcatcttgtcatgatgtcagccaacaatttgctgaaattgtgggaatgcttgagagtgcagagaatgagatcatgacaaaagttcagaaggctcggttcaggtgttgcatgacccatccaatgactgctgactgatctgatcctctgcgaaagcaaatggaaaaaagtcataaaaacatagactggaaaatttgggggcaagatgaaactctggtagtgaagg

SEQ ID NO: 47086 - DNA, 243 bp, Glycine max
  Clone ID: 701038674H1
caaagtcccaccacttggttttcataacccattctccatctcagaatggagaatgcgagaataagccagtggttgatccttctggtgtgtgcgctgctgttgctgatatcagaagcttcttatgtgccaatcactattgttcagaacgcggtagcaaaaggagctgtttgtttggatgggagtccaccagcttatcattttgataggggatttggatcagggattaacaattggttggttgca

SEQ ID NO: 47087 - DNA, 241 bp, Glycine max
  Clone ID: 701038676H1
cttctctctcctttcggttttcaccttttcttttcccacacaagtacgtactccctagatccaaccacttccattgccaccaattgcttcttcttgtttattttgctcccataccattagcaacactgtgttagatactcagatcccccctcttttctctatgccattcccccagctgggaagggtgtactggaatcagagtgtagctgtggggtgcagattgattactattcttgtgttg

SEQ ID NO: 47088 - DNA, 244 bp, Glycine max
  Clone ID: 701038677H1
gttccctggaaacggagttcaagtctcacctgttactccatctgctgatgttactgcttacttcagctctgagcattcgagcaactcgtttgattattctgaccttggatggggtgaacaagtccccaagacccccgagatctcatccttgctttctgctgctcctttggagggtgctgctgatcaggttcagaagaccaacaactcgcaggatgtggtggctgcacaagatgattctgcaaaa

SEQ ID NO: 47089 - DNA, 248 bp, Glycine max
  Clone ID: 701038680H1
gtctctacaatcactccttcctctcatcctctataaagaaagtgcttaatttgtgttgttacttggttcagtttccatggattgggggcttgctatatcttctcatcctaaaccttattcagtcacaactggtggaaatctctggcggagtaaacacaccaccaagaatatttactttgcaagttcttggatatcaaaagcttcacgacacaaaagggaaactcaaatagaacataatgttttgaggt

SEQ ID NO: 47090 - DNA, 243 bp, Glycine max
  Clone ID: 701038683H1
gtgtggctgaagtgttctccaggattgatcataagtttgacctcatgtatgcgaagagggccttcgtgcactggtatgtgggtgaaggtatggaagagggtgagttctcagaggctcgtgaggaccttgctgctcttgagaaggattatgaggaggttggtgccgagtctggtgatggagatgatgatggtgaaggagatgatgattattagagtgtctgaaatatcgtgtgtttgatgtcta

SEQ ID NO: 47091 - DNA, 187 bp, Glycine max
  Clone ID: 701038684H1
cttcccccaacaaactaaaccaaaccaaaccataccattaagaaacaacacatctatctcagtccccaaaccaagaaaccctaaattaaattcatgtgctcctccgggtctaccagtgctgcaccaacaagaccttgttacttggaacaaggccacggcttggcttccttaaaacacatggatgcgt

SEQ ID NO: 47092 - DNA, 182 bp, Glycine max
  Clone ID: 701038685H1
tggaatctacagtgttcttaaccagaagcgtggacacgtgttcgaggaaatgcagaggccaggtaccccactatacaacatcaaggcatacctccctgtcatcgagtcctttggtttctcgagcacattgaaggctgcaacatcaggccaggccttcccacaatgtgtgtttgatcactggg

SEQ ID NO: 47093 - DNA, 256 bp, Glycine max
  Clone ID: 701038642H1
gacgttaccaaccttgggagataggagagatgcatacggtattcattttgaatgggatgctaactttggaattccaggagcaatttacatcagaaactatacgtatgatgagttcttccttgtcagtgtcactcttgaggacattccaaatcaaggaaccattcactttgtttgtaactcatgggtttacaactttaaagactacgacaaaaaggatcgcattttctttgccaataagacatatcttccaagtgca

SEQ ID NO: 47094 - DNA, 246 bp, Glycine max
  unsure (1)..(246): unsure at all n locations
  Clone ID: 701038611H1
cggaaacacccttcaaacgacgtacggcgtccggtgaagttgcttgtcaggaagtggaaggaaattgttgatgaatgggtgaagttgaatcctcagggaagaagcaacactctgatggctcatggagactcgccgcctgtgcagaaaaccacccaaaatgggcatcatcatcagcagattcctgattttgcatactctcccaatccacacaacggtagctcccggncngagcgtaacaactcagaa

SEQ ID NO: 47095 - DNA, 221 bp, Glycine max
  Clone ID: 701038612H1
cggcaccagcgaaacgctcttcgttatcttttctcagactccgcggcgtagatccgaggagttcgggaaatcctaactcatcatctcaactcaagtcatggctggacttgcacctgagggatcacagttcgatgctcgtcaatatgattctaaaatgagtgacttactttcatctgatggacaggacttcttcacatcttatgaggaggtttatgatagtt

SEQ ID NO: 47096 - DNA, 251 bp, Glycine max
  Clone ID: 701038613H1
caactcatcatcatcttcttcttcttcttccttcaattcgcttttcatccaaccaggacatggcggcagatgaagatatgtctttgaagtctaatctgagtcaatcaaatgaaacttggaagcaggagatggaaagaagtcaatctcaagtggatgtattgcaggcaaggataatggaggtaagggcacaaatacaaggctcaaaggaagatgcaaaaaaggagttagaggttctatggagaagagtcaag

SEQ ID NO: 47097 - DNA, 253 bp, Glycine max
  Clone ID: 701038614H1
cacgcatttcctcgttttcttcttcttcccttttctctcttctctctctttctccggcgacgatctcagattccggtcactcctctcgccggcgatcccttattcctccgtcctccgtcgagtcctttccgattcgaatcgttcccagccttgtgccaccatgaatcccgaatacgattatttgttcaagcttttgctgattggagattctggtgtaggcaagtcatgtcttctcctgaggtttgctgatgat

SEQ ID NO: 47098 - DNA, 232 bp, Glycine max
  Clone ID: 701038615H1
aacacaacaacactctctcttctcgctcttggcttttcgctcttcactcactctcattcattcatttccaccgttcatggatccactaagcgtgtggggtaacacgcccttggcgacggtggatcccgagatccatgacctcatcgagaaggagaagcgccgtcaatgccgcggaatcgagctcatcgcctccgagaacttcacctccttcgccgtcatcgaggccctcgga

SEQ ID NO: 47099 - DNA, 252 bp, Glycine max
  Clone ID: 701038616H1
ctcacaaggattgagtgttggatctagtcatctagatttaaaaaaaaaatgaagatcattgagaaaattcgcgcagttactgctgatccaaacagggtggtgttctcatttgagttcttcccccccaagactgaggatggtgtggacaatctgtttgagaggatggaccgcatggtggctcacaactcctctatttgcgacatcacttggggcgctggagggacaacggctgatcttacatcggaaattgcc

SEQ ID NO: 47100 - DNA, 253 bp, Glycine max
  Clone ID: 701038617H1
ggcttccaaggagttctctggtctttgctccttggctccttcactatctgagagcattttgtgcactactgggttgaaaatgtatatgctggagagcaaaggaggtgccatagcatgcatgttcttgcctcttttcttcttggggacatggcctgctcttttgactatgttagagaggcgtggtcgtcttcctcagcatacctaccttgattactcaatcaccaatttcttggctgctttactcattgctttt

SEQ ID NO: 47101 - DNA, 253 bp, Glycine max
  Clone ID: 701038618H1
atcaattctaattctgatttggttcggaaagaagtggtcgtaagtcatttctctcttgtaaatatggcagccgatacggaacctaagaagatcataattgataccgaccctggcattgatgatgctatggcaatattccttgctctacaatcacccgaagttgaagttattggactcacaaccatctttggaaatgtgtacaccactctggcaaccagaaatgccttgcatttgttggaggttgctgggagaa

SEQ ID NO: 47102 - DNA, 250 bp, Glycine max
  Clone ID: 701038619H1
acacactctcatagctgtagacggcgacactaagatcggagaaagaatggcgaaaacgacgtcgttgctgctctttacactgctcctcttcggaaccctagctctcatccaggcgaagaaatcgaaggaggatttgaaggaggtgacccacaaggtttactttgatgttgagattaatggaaaagaagcaggtcgtattgtaatgggtctttatgggaaggctgtccaaaaactgcagaaaacttccggc

SEQ ID NO: 47103 - DNA, 253 bp, Glycine max
  Clone ID: 701038620H1
tgttgccgtgcagaaatacttcagacatggtccttggtaccacgaagctgatatgaggacaggaagagcaacttattggcagcttacaagccttcaagcattttggcctggcctacaggttcttattggggatgttatcgctgccaattcatctcaccgggagtttttccatgtgtggaagaactatggagtgctaccagagaggtatttgctggattatcagatgcttcaccctactgagaaatattaccct

SEQ ID NO: 47104 - DNA, 253 bp, Glycine max
  Clone ID: 701038622H1
actcgagcgaatcggctcgagtttcatggttgatgatccaacggcgataactgaagacaccacacatgttcctccacggaagcgacagaatcttcttctagaaataccctcaagaacagaagagagttctcaagaatttgttgcaatcaaaatgccaccgacacccagttccaatcccactcctactccaaagagagtgaattttcttgtatcggacaccggcagatattgaaaaaccaaatactgcagctcc

SEQ ID NO: 47105 - DNA, 252 bp, Glycine max
  Clone ID: 701038623H1
cttctccccaattctcaaaccttacctagtattttcgtttctgaacccaattaattaagcacacaaggaccataacatacctatacctcaatatcacaagtcttatggaggcagagcgagacaagtacaagatgatcaactttgaagaaaccgagttacgactcggcctgccactcagtggaaacgagacgctcaaaaacacttgcagcactgggaagagggttttttcggatactgccgtggatttgaagc

SEQ ID NO: 47106 - DNA, 248 bp, Glycine max
  Clone ID: 701038625H1
gctagacttagctattcttacctcttggcatgaccattcaaatgtcttcttttctcttagcttctcttgctgttttctttttcttctcctccttggagaagagttttgcctttcaagcagcaagaaaggaggacacagaaagcaacaatcttcatcaatatactcatcttgttcacctcagctcactccttccttcatcttcttgcagctcttctactaaaggtctaaaaacaaaagcatcattagaa

SEQ ID NO: 47107 - DNA, 250 bp, Glycine max
  Clone ID: 701038626H1
cgaatagccactttgcgcaccacgatgaggtgatgcttctgggacacgacgataagtatttgccagataggggcatgcaggttacaatcgcgtttaatcacttcggtgagggtctggtgcagcgtatgccacgatgcaggctcggttacatccacgtcgttaataatgacttcacgcagtggaagatgtatgctatcggcggtacgctaaccccaccatcaacagccagggtaaccgttacaccgctccc

SEQ ID NO: 47108 - DNA, 247 bp, Glycine max
  Clone ID: 701038627H1
gtgagtcagagcaacccagcagctccaccaccacctgtgggttatcccactaaggatgatgttccttcccaacaaaatgttccaatcaaaacctctactaggggtgatggcttttggaagggatggtgagttcatttataaccaaaatcttactttgtctaattaattagggtactgatatttatagcaagtacaataattaaggacacaagttaaagaattttaaaatagaaagttttgtattgaa

SEQ ID NO: 47109 - DNA, 252 bp, Glycine max
  Clone ID: 701038628H1
gtcgagttcaacgctgctccacccagtccacttttccatgatgtgaaaagcgaggatgaatacaatgaagaagaggaagaagaagaagaagaagaagaagaagaagaagaagaattggacagtgatgatgatgatgaggatgcagacgaagatgatgatgtttcgagcaaccatgtttcaacgccgttcatgaatccagggtcaaaagggcatggctgccaatcgaaccagtttgcgatattggatattttg

SEQ ID NO: 47110 - DNA, 250 bp, Glycine max
  Clone ID: 701038629H1
aacttgcagtaatggcttcaatgaataaccaaaaagaaattgagctctttgagggccaatctcttctgtacatgcagctatatgggcacctaagacctatgtgtcttaagtgggctgttcaactaggtattccagacataatacagaatcatgccaaacccatttctctttctgacttggtctctactcttcaaattccaccagctaacgctgcttttgtgcagcggttcatgcgcatcttggcacacaa

SEQ ID NO: 47111 - DNA, 249 bp, Glycine max
  Clone ID: 701038631H1
ctcgagcgattcggctcaggtgttgacgttttctttgttcttcactgtgtatgcgaccatggtggatcccaagaagggagcacttgctgggcttgggccaacgctggttgggtttgtggttggggccaacatcctcgcaggtggggcttactctgctgcttctatgaacccagcaaggtcttttgggcctgccttggtcgctggaaactggaccgatcattgggtttactgggttgggcctctcattgg

SEQ ID NO: 47112 - DNA, 232 bp, Glycine max
  Clone ID: 701038633H1
cctcgagcgattcggctcgagcaaattgattgacatcaaacctcaccaccgctgctaggtcaagcttctctgtcggtcattgcatctccaatctcgcttcttctctcagattcagataccaattcggtttcttccgaaccaaacttgtttttgagaaattcggcaattgattttccatggccaacaatccgtcacagcttctcccatcagagttgattgaccggtgtatagg

SEQ ID NO: 47113 - DNA, 213 bp, Glycine max
  Clone ID: 701038634H1
attcttattggcaagtgaaatctttgcttgaaaagaataaactaagtggttgtcctgaaaagttttaaacgaggatatctgcaggttatggaaaaatctctgaaggctcattatatattattaagttcgctcaattctgggatataattttatgaccttgtgttaactcatacatcttttggggtttctcaggctttggtcgtgtaatagatt

SEQ ID NO: 47114 - DNA, 252 bp, Glycine max
  Clone ID: 701038635H1
tctctctcacactttctctcagcgttgaaacttgaaattcttcttctccgaaacctctttgaaccgggtcaagaaataaacctcgctgggaaccgttgattgggtttgtacgaataatttgaaatgaagattcagtgcaacgcgtgcgaggccgcggaggccaaggttctgtgctgcgcggacgaggcagcactgtgctgggaatgcgacgagaaggttcacgcagcaaacaagctcgccagcaagcaccag

SEQ ID NO: 47115 - DNA, 253 bp, Glycine max
  Clone ID: 701038636H1
gacactcacaagaacaagaagaagcatttagaatcgaaattggaagagaagcataaggagggtatgaatgattacaaaggaagagaaggagaaagtagtgttgttgttcggaagcgattcaaggagaagcagcaacaacaacaacaacaaccctttccttccacaagggccatcatcaaccaacaacaccgtcgctgtgcctccctccccaacaacactcaatacgaggaatctgaaacagatgtcgaagtgt

SEQ ID NO: 47116 - DNA, 248 bp, Glycine max
  Clone ID: 701038637H1
cggctcgagcggctcgagacttgatcaccttttttgagaaaagatatatatcaatggcaactccgagtgtgttagaagtccgccctcctgctttaacttccatctctgaaccacttccattttttgatggaaccacaaggttatacatttgctatctgtgcccttttgcacaacgcgcatggataactaggaactgtaagggattgcacgacaagatcaatttggttcctattgatcttaaaaacagg

SEQ ID NO: 47117 - DNA, 253 bp, Glycine max
  Clone ID: 701038638H1
accaaaccaaagcaagaatagtgttctaagagtgagcaacaacttcaaacaccattgtgagaaatggcttccaagggtgcacttctcttgtgtctcaacattctcttcttcactgtggtaagctccacatatgtcccatgcaacccaccccctaaaactcctaaacacacacctgtcccaaagccaccttccccaaagcaaccaagttgccccaaagacaccattaagtttggtgtgtgtgctgatgtgttag

SEQ ID NO: 47118 - DNA, 249 bp, Glycine max
  Clone ID: 701038639H1
gttcatttctacacatccctagctctgtcgttccgtcgttgacgatggcgtttcgggtgcgaagccctgacctccgctctctctttcttctctctctcttgtccatcgcttccgccaatgtcttcttcgaagagcgtttcgatgacgggtgggaaaatcgatgggttaaatcagattggaaaaaagatgagaacgtggctggggagtggaaccacacctctggtcaatggaatggagacgctaatgaca

SEQ ID NO: 47119 - DNA, 254 bp, Glycine max
  Clone ID: 701038610H1
agccaaaggcacatctaaatcatttgatggtggcacaaggtcattagaaaggagtaaaattcttctaaatggaaagcctccaagttactcattcaatcagtcttctgaaggaaccaaagacggggaggaaaatgataaatggaaaggaaattccgatgataaaccaaatgacttacctacagttgatacagaggatagtgttccgggagttttgtatgatttgctgcagaaagaggtcttagccttgaggaaag

SEQ ID NO: 47120 - DNA, 278 bp, Glycine max
  Clone ID: 701038575H1
ctgatgttgatgacaatgatgggatacttgctaaatcaattagtgcttctactcaagagcctgaaattaaggagcaacaactagccacagaaacttctagcactatacaccacaaaggttctgaattgtctgaaaccaatcagcagaatgatcgaataccatctgatgcccgggtgaagcagatacaagatcagcttatccaagctaaggtctatctttcccttccagttgtaaaatcgcatccacatctcactcgggagcttcgattacgggtaaaa

SEQ ID NO: 47121 - DNA, 276 bp, Glycine max
  Clone ID: 701038576H1
aacttgttggccaacaagggtctcttaagttctgacgaaattctcttgacaaagaatcaagtatcagcggatttagtgaagcagtatgcagaaaacaacgatcttttctttgaacaatttgccaagtccatggttaagatgggaaacattactcctttaacagggtcaaggggagagatcagaaagaactgcagaggaattaacaagtgatgtagtgatatcattgtcatgtgacacgtgtgaaagttgcacctacattttacttttcttcctctt

SEQ ID NO: 47122 - DNA, 277 bp, Glycine max
  Clone ID: 701038577H1
cgcggctaaagtttgtgagtcgtctctgccaccaaccccgcactgtgtgggatcttcaatggcaccttccttatgtctatcccttccaaacacttccaccttctctgatttccacaagctacactgtttctgtttccacccaaaaaaaccgattcggcaatttatgtctggttgggtcccagaagctcggcacgtggcggcccatttgggttaccgaaagaagcttaatgcgttgagccaagatggagagagctaccacgggacgatggaggataac

SEQ ID NO: 47123 - DNA, 278 bp, Glycine max
  Clone ID: 701038578H1
ccacagggcaaaaaccatcgatgatgtttctctgagtctgaggattcacgcgttactgttacttgaaaagagaagaagaagaaaaaagtggttttggagaaatggttgagcaatcggtgctggtgctcgaaaagcaaggggcaaatccagtgttatcagaaggaatccacgattgggtgtttgactgccatgggcttttgcacaatgcggttttgatcatcgcttctttgcttttcgtcttgtacttagcactgcaagctgcaaagagcttcctcaga

SEQ ID NO: 47124 - DNA, 280 bp, Glycine max
  Clone ID: 701038579H1
ctcaatttcagttcttctacgttctaaccattcgcaaaacgacttcgttttaatcttacatcctcgttagtcgttagtacttacgcgaaccagctgaatgcacggcaacgtcggtcacgtgaccaatggcttctcatcaattcctcgacaacttcataatttccgatcacattctcgtaccgggctcctccgactccgaggttgaaaatgtcggtgacgtgcctcactgtccggtccttgttttcgtcaactccaagagtggcggtcaactcggcggaca

SEQ ID NO: 47125 - DNA, 286 bp, Glycine max
  Clone ID: 701038581H1
gttcggatctcgcgtcgatcttttttccttattgttgctatgattgtcgtctgtttagttccaaattctgacattagcataggagcactgtgattttggatgactatatggtcttccagttatcccttggtaatatatgtgactttgtagatgcataaatgttgtcgctccaaggtgtcttaatgacactgcttctctctgtgtttggctttgcttgtagttgatttaacatgtcttttgcccaaattgcctgataatcagatttcagatggtctatcctgtaaag

SEQ ID NO: 47126 - DNA, 275 bp, Glycine max
  Clone ID: 701038582H1
ataacaacaaaatagagggtaattttccaccttcttcgctacataccataccataagggcaccctttcaacgcatgctttccctcccaaattcttcacctttctcccctctttcccttcatttttctattatcttacatgttgttgcatccgtgccaaaaggggtttgttcctgcacaattaaattcaaccccttaggctataaaaaaaaaagatttttcattttcaattctttggaaggtttcaataataagaagcccttgattctagaagaaa

SEQ ID NO: 47127 - DNA, 275 bp, Glycine max
  Clone ID: 701038583H1
ggggaacacggagaagctgatgaaccagatcatggaattgaagttcacgtcgaaatcgctgcagcggcaatcgcgtaagtgcgagaaggaggagaaatcggagaagctgaaggtgaagaaggcgattgagaaaggcaacatggacggagcgcggatctacgcggagaacgcgatccgtaagcgcacggagcagatgaactacctccggcttgcctcgcgcctggacgccgtcgtggcccgcctcgacacgcaggcgaagatgacgacgatcagca

SEQ ID NO: 47128 - DNA, 278 bp, Glycine max
  unsure (1)..(278): unsure at all n locations
  Clone ID: 701038584H1
ccaacaccacactcacgcaaatggatccgctcaggggatccgaacccgaaaaccctaccgccacgtgtctctccatgctctccctccgccgcttctccgcgtgccgcgacttcgcccgtcgcctcnctccctccgacttcgtcgcccgcgtcctcgccgtagccgacgtcctctccgcctccgacttctactccgtcctccagctccgcccttctgacggcggcaaccgcgacctcgcgcggcggcagtacgcaaaactcgcactcctcctcgaccca

SEQ ID NO: 47129 - DNA, 273 bp, Glycine max
  Clone ID: 701038586H1
cttagttctgccacacaggatccagggccctctaacactcttgctcttccaggtccaggagattccaaggattctcagaaaggaggaccccaaaatgccttggttgttggtccaactatgccatccacaacaccgaatgatactggctttcagagcaaaagtacagcggttgtttcagcctctggttcatctgaaagaaatttatcaacatctgctttgatggaaagaatgccaagtaaatggccacgtcctgtatggcatgcaccatggaag

SEQ ID NO: 47130 - DNA, 273 bp, Glycine max
  Clone ID: 701038587H1
gtcattactatattttatgaccctgaaagagtcatgtggaactcctagctaataatctgttatgtaacaatagcacaactgagtgaaatttcgtatattagtatttctggcatatctagtgaagtctttgaattcttgctggacttatatgatgtgcctcatactctttcagtttttcattggccttgtattttttcttagcgacatagaattggtttcaacatttgaaagatgcctctgaagtctcaataagaatccaattcctgttaagta

SEQ ID NO: 47131 - DNA, 277 bp, Glycine max
  Clone ID: 701038588H1
attggggtcacttccttgtacattggttggggtctagatggctctgtctggatttcatcagaattgaaggggttgaatgatgattgcgaacattttgagtcttttccacctggtcacttgtactctagcaaagagagagcgtttcgcagatggtacaatcctccatggttctctgaggctattccctcagcaccttatgatcctcttgctttgaggcatgcctttgagaaggctgtggtaaaaaggttgatgactgatgttccctttggtgttttgc

SEQ ID NO: 47132 - DNA, 277 bp, Glycine max
  Clone ID: 701038591H1
ccagacacagagtgcgttcgttgacgacaaacacacacaaacacacaacaaaacgtcaacggaaaatctttctccggcgacctggaattccgacgaaggtagttgcggctccttcgtcccgaaactgaggcccccaaagtataaactttggtggtggtgggtaggatctggcggtgtatgatgccgatcttgcatatgcccgttggagactccggcgaggttgctttggaccacaagcttcttccgtcatcaacttatgatcttctaataattaata

SEQ ID NO: 47133 - DNA, 275 bp, Glycine max
  Clone ID: 701038592H1
gcgttcatgatttacccgacaagggaactcgacaatactatgttgctatggcccacagagaccgaatattccggggccggagactcgccgccggttaccactcgcctctcacttttatcccctccaacgagacttatcagattgaagcctttggattcttgcattttgccaatgtttctgttgggactccaccattatcgtttctggtggcattggatactggcagtgacttgttctggttaccttgcaattgtaccagatgtgtgcatggtata

SEQ ID NO: 47134 - DNA, 273 bp, Glycine max
  Clone ID: 701038593H1
ctcttccccaccaaactaaaccttttctcagtgtagaattttcagaatttgaggtatggggaggctgtttgtgacccatctggaggggcagatctatacctgcaaacactgccgcacccacctcgctctctatgaagacatcgtttccaaggctttccacagcagacatgggacagcttatctcttcagtaaggtgtaagttatccttgattttagattttggaaccctatcattatgtgattactataaacaaaaactcagatacatgttct

SEQ ID NO: 47135 - DNA, 277 bp, Glycine max
  Clone ID: 701038594H1
ccaaataggagtctgtgtaagggaagaagatggtgtcaggttctggaatctgcgcaaagcgagtcgtggtggacgcccgccaccacatgttgggtcggctagcgtccatcgtggcgaaagagcttctgaatgggcagaaggttgcggtggtgcgctgcgaagagatttgcatctccggcggtctggtgaggcagaccatgaaatacttgagattcctccgcaaacgcatgaacaccaaaccctcccatggccctatccacttccgcgccccagccaa

SEQ ID NO: 47136 - DNA, 190 bp, Glycine max
  Clone ID: 701038595H1
caagatagagaaggaaaaggacaaatctggcccggcagagaaagaagggcaagaaagctcaagtttaaagactgctggtgctgaaggagaaataacagcaggatttttattaaagaaaagtgcaaaaactaatggttggagcaggcgatggtttgtgctaaatgaaaagacaggaaagcttgggtacacc

SEQ ID NO: 47137 - DNA, 231 bp, Glycine max
  Clone ID: 701038601H1
taacctgtccgcgttctctctctctctctgtatcttgcgaaatccgttcccctatctgcttttcgagttgttgctaaagagtgatggactcaccgcccagcaatcaccacgcggtcgacggagacgccaacgacgtcgttagatccttttcccaccgcgacgacgatgaagacggcaagccccaacccctcaccggggacgcggcagtcctggaagatattcatagggggt

SEQ ID NO: 47138 - DNA, 257 bp, Glycine max
  Clone ID: 701038603H1
attccaaattctcaactttcctaactttagcaaccatctaagaagttcagtcccttaattatctctcaccttgaattagaaaagcattcaaagctttgaacccaatttcactgtttgcacctcaaacatcttagaagtcccaattgagtctcaattccacaaccaaaaatgcaaagttcaatttcacaatctgatatttttatcactgattaccttgtaccccaagaagttccatttcaatttcaatttcaagatat

SEQ ID NO: 47139 - DNA, 172 bp, Glycine max
  Clone ID: 701038605H1
gtggcttttgagggaaaggagggaacttttagtgtgggagggtggaaactggaattgggtttggttgggggtaaagagaatgaagattcagtgtaacgtgtgtgaggctgcggaggccaaggttctgtgttgtgctgacgaggctgcgctgtgttgggagtgtgatgagaag

SEQ ID NO: 47140 - DNA, 266 bp, Glycine max
  Clone ID: 701038607H1
ggcagactagtatccgatcctctgtcctctcgaagctttcatcgttcaacatattctcaccatctcagtcatgggcctgctatcttgttttaggtctaccgtcctgagaaaatgttccaaaggaagctctggcatgtcaagattcctgtatacgaacaattttcaacgaaacttgatttcgtctggtggcaatgaatcgtattatgggtattttaacaggagatcatacacttcactttatatgggaactggaactgtgggtggga

SEQ ID NO: 47141 - DNA, 254 bp, Glycine max
  Clone ID: 701038608H1
ctcgagcgttttttttcaaaacaaaattaattttattggctcgaaattgaatggttgtttcctgtatcttgtttcctctatgcaataacgaagtacaaatagatgggtatacacaacaattctattttcatatttcataatatacaatcttacttcttttatggatacaaaaggggaaaaaaatgatttcacatacaacaattgctcagggattttgatggttggatatttgaattccttttttcaattcttta

SEQ ID NO: 47142 - DNA, 251 bp, Glycine max
  Clone ID: 701038609H1
agggaagatatcaagatgcttgtgaagaagtggtgggacatatatgaagatgagacactggactacaataacaactctgtcaacgtggaacgtttcacatcggcactattggatgctgggggctttcagtttgtgccagcaccttctgctgcctaatatgcttattatttacagctacaaattaatgttaattaacgacaaagtatatgtattgttatttgcttttattcgtttttgggtcttatatatga

SEQ ID NO: 47143 - DNA, 277 bp, Glycine max
  unsure (1)..(277): unsure at all n locations
  Clone ID: 701038574H1
aaaacatctcaatgggttcttcttctattacaacatcgntacaaaccatgacctcggctgcgatcgtgctcctgttcacggtctttgccgtttcctccgccctagacatgtcgataatctcgtacgacagcgcccacgcggacaaggccgccaacttgcgcaccgaggaggagctgatgtccatgtacgagcagtggctcgtgaagcacgggaaggtgtacaacgcgctcggcgagaaggagatccgcttccagatcttcaaggacaacctgcgatt

SEQ ID NO: 47144 - DNA, 280 bp, Glycine max
  Clone ID: 701038546H1
gcgtgaagctctaaatgaaatattgggagaagatattgccaagcacgtaattctaaaggtcaccgaagatggatccggcattggggctgcactgcttgctgcctcttattcatcctaaactgtggatagagggtacacctgctataaaaatatatataaattgtttgatattttatatatatatatatgtatatatttatatatatgtacatatatatatataggcacacacgcacgtatagccatgtaaatcagaatttattcacatatttaatatctg

SEQ ID NO: 47145 - DNA, 281 bp, Glycine max
  Clone ID: 701038549H1
gttcgcactcgcagattcttgagcaagaataatggggaagaaaagaaaacacagtgagactactcaagctgtagcacaacccaaaaaggaagaggctgctccagagagaccggctaggacccttttggggtggaaggataagaatcaagttgaggatgattcaccaatatttaggaacaaagagaagctattggtcacttgctctaggcgcatcaattacaggtaccggcatttgatgttgaatttggtcacacttttgcctcattgtaagaaggataaca

SEQ ID NO: 47146 - DNA, 278 bp, Glycine max
  Clone ID: 701038550H1
aatcatctttagttcttcagtaatttattgtgggattctattctaagattttgagaatgtctagctgtgggtgtggaagcagctgcaactgtggcagcaactgcggttgcaacaagtactcttttgacttgagttacgttgagaagacaaccacagagactctagttttgggtgttgggcctgtgaaggccaatgtcgagggtgctgaaatgggtgttgcatctgagaacggtggctgcaactgtggatcaagctgcacctgtgacccatgcaactgc

SEQ ID NO: 47147 - DNA, 278 bp, Glycine max
  Clone ID: 701038551H1
ctcgagcgctcacacttcccccaattcccaaacctaaccctctctcttccggcgtactgggggtggcgtcgccagcgattcccccctccggttccctctccacccttcaattcaaccctctcgtcttcgcttcactgattccctctttcaaaatgcttccgatcgcttgctagggttttccctctcccaaatctcctcctcggaaagcaccctgtaccttttattcctccgactaatcaacttctttgctatagctattcgtgtaaccttttcctttt

SEQ ID NO: 47148 - DNA, 281 bp, Glycine max
  Clone ID: 701038552H1
ccaacatctcatacacttgtgtgtcatagggtggtctcctttggtgagaattgagaagacactcaattcatcaccttttccctctctccttttccaaagaaaaagaaaaaaagaagatcaattccaatggaggtttcatgcaaaattttgagaagatcaatccacagttttcttcaaaactaccattattttacctcaactgcagcttttctagcccttcctttctccgcatcaatactcctatcagaagcttttgtgccagcctcttcatccctcttgcc

SEQ ID NO: 47149 - DNA, 277 bp, Glycine max
  Clone ID: 701038553H1
gcactatagaaaaaacgacattcattcatctatggctacccttattgctcccagcaaccactctccccaagaagacgctgaggctctcagaaaggcttttgaaggatgggggactgatgagaaaactgtcatagtaatattgggtcatagaactgtttatcagaggcagcaaatcagaagagtctatgaggaaattttccaggaggatcttgtgaaacgcctagagtctgagatcaaaggagactttgagaaagccgtgtaccgatggatactagaa

SEQ ID NO: 47150 - DNA, 280 bp, Glycine max
  Clone ID: 701038554H1
caaatagggttagggttagggtttatgcaatcgaattcctgagacggtgcatttgtacgtaatcgatggcgaatcgcacggatccagcagctaagagcataaggggcacgaaccctcagaacctggtggagaagattctccgatcgaagatataccagaacacctactggaaggagcaatgtttcgggttaacggcggagacgttggtggacaaggccatggagctcgaccacctcggcggcacctacggcggaaaccgcaaacccacgccgttcatgtg

SEQ ID NO: 47151 - DNA, 274 bp, Glycine max
  Clone ID: 701038555H1
gcatattcacatgagctgccacgatatggtcttgaagtaggacttacaaattatgcagcagcttattgcactggtctcctgttggcccgaagagtcctcaaaacacttgaaatggatgaggagtatgaaggaaatgttgaggctactggagaggattattcagtggaacctgccgagagcaggaggccattccgtgcactccttgatgttggtcttgttaggactacaacaggaaatcgcgtctttggtgcccttaagggagctctggatgggg

SEQ ID NO: 47152 - DNA, 276 bp, Glycine max
  Clone ID: 701038558H1
ctcgagcgttataatagaacgcggaaggagaagaagaagtaaccgacgcttgaacacaccgaaccgttcttcgattcgggttcaagttcgaagaagaaaagcgatgagttcgggtagtagcagcagccacagcagtgaggaggagaaggagaagcagagagtgagtcggacgtcggtgatactctggcacgcgcagcagaacgacgccgcagctgtgcggaagctgctgcaggaggatccctcgcccgtcaaggccagagactacggcaaccggac

SEQ ID NO: 47153 - DNA, 281 bp, Glycine max
  Clone ID: 701038559H1
ctcgtttattctcagaaccttctgaggttaaagcaaaaaacaaagagagagagagagagaacatgatgaagccatcgatgctcagatctctccactccgccgccacccgcggcgcctctcatctcttccgccgtgggtacgcctccgagccggtgccggagcgcaaggtagccgttctcggcgccgccggcgggtatcgggcagcctctctcccttctcatgaagctcaatcccctcgtttcgagcctctccctttacgatatcgccggaactcccggcgt

SEQ ID NO: 47154 - DNA, 278 bp, Glycine max
  Clone ID: 701038560H1
tggcgatggaaactatgctcacaacaagtgacagacacagagtagaagcaaaagattcataataactaacattagaaactaggtgaaagtaactgcacagacacacaacacatcttccttaatttctccgtccatttccctcccataaataaatctttcatttccatctttcttgggtgatccaatggcgacccttttccagggattgggagttgtgaacccatcattggcttcttcaaactccaacaagttccatcttccttctcgtacatccctct

SEQ ID NO: 47155 - DNA, 278 bp, Glycine max
  Clone ID: 701038561H1
gtggtttcagtgagtgatcggtgttcacttgatccttcataagtcgtcatcatcatcatcatcatcaccgttgattgaagaagatgccgatcagaaacatcgccatcggaaggcctgaagaggctactcaccccgacacgttgaaggcggggttggctgagttcatctccaccttgatcttcgtgttcgccggttcaggttccggcatcgcctacaacaagctcaccgacaacggcgccgccactcacgccggcctcatctccggttccatcgcccat

SEQ ID NO: 47156 - DNA, 279 bp, Glycine max
  Clone ID: 701038562H1
acgacacccgcatcaaaagtcactccattcccatcacaatacaatatccagcatttcgcttagcgtaggaaatggaagtcacactttcatcctgcaagtccattagctcgccgtctgttcccgtcgcaggtttgtttgcggggaatggaggaattaagagctcgcaatgcagtttcttagcgggatcgagcaaagtcaggtttcctaggcaagtaggtcaagttagccaccttcgcaaacagcgccaaacgcgtcactgcggtgctctccacgcgactt

SEQ ID NO: 47157 - DNA, 267 bp, Glycine max
  Clone ID: 701038565H1
tagtgttagttatagcaatctgaagaacggcatgatagcattcttagtccctctaccctccatcctattctacctctcattccaatcggccattagtactccttcttcttggtcttctctgtggacatggtgctatcaccagcctctgctattggccaatgtccttttcttcttcaatgtcaatttcctcttctggctcatcggcctaatccaatccagccactggatgattgacccgtattggacagtgatacctgtgatgcttgt

SEQ ID NO: 47158 - DNA, 278 bp, Glycine max
  Clone ID: 701038567H1
agaaaagcccagttttgctgcttcaagttcaagcactcacttcagttctgccactgtcttctgctttgtccaattatagtcattttgaacagtgatgaagcaagggtcagcaaacaaccaacagctcttttgggcaagagtggttatgcgcaaatggcttaacatggctagtaacgagcctgattacaccgctgaccctgatgatgataatgaggatgaccctgaaagtgactcagataatgaagagttgggaaaacggacacggtttggggacagca

SEQ ID NO: 47159 - DNA, 277 bp, Glycine max
  Clone ID: 701038568H1
cgcaacaaaaagaaagaatcccaggcgaggagaaagatggaggggaaggagcaggatgtgtcgttgggagcgaacaagttccccgagagacagccaattgggacggcggcgcagagccaagacgacggcaaggactaccaggagccggcgccggcgccgctggttgacccgacggagtttacgtcatggtcgttttacagagcagggatagcagagtttgtggccacttttctgtttctctacatcactgtcttaaccgttatgggagtcgccgggg

SEQ ID NO: 47160 - DNA, 279 bp, Glycine max
  Clone ID: 701038569H1
cttcattcattccccttctcttatattcaaaatcacgttcaactttctcccttcactcatctcacaaaccatgagcacaatccaccaaacacacactcgtcgcgaaggtgaagacaaagagttcagtttctggggctcatcaaacatcataccttctgaaaatgattgtgatcaaccacaaggtaatgaatcaaggctcaaaaaggaagcatactttggagaaacacaccaaagaaaaagccttaaatatgagtattcacggttttgttcaacagtttc

SEQ ID NO: 47161 - DNA, 277 bp, Glycine max
  Clone ID: 701038570H1
ctcttctcttctttgatctccgttaccctttttgttttctcaacagagagagagagagagaatctttcgaagttcgtttgcgtgtgttgtgtggtcagtcaccgatggcagcaccacctgcgagggcacgtgccgattacgattacctcatcaagcttcttcttattggcgatagcggtgtgggaaagagttgtctgcttttgcgattttctgatggttccttcacaaccagttttatcaccaccattggcattgattttaagataagaaccattga

SEQ ID NO: 47162 - DNA, 276 bp, Glycine max
  Clone ID: 701038571H1
ctttggttgaaagtagcaaagatgtttcctttcgggcaaaagggtcaaaagataaaggggactatggtggttatgcagaagaatgtgttggatatcaacagcatcaccagtgttggagggatcgttgaccaaggcttaggcttcataggcagtgcagtcgatgcacttacttttgcagccaccaaaatctccatccagttgattagtgctaccaaggctgatggtgggaaaggaaaaattggaaagagtacaaatttaagaggcaagataacatta

SEQ ID NO: 47163 - DNA, 278 bp, Glycine max
  Clone ID: 701038572H1
gtcatctcaatgagtttgacagtggttacttctcttcttgagaagtatgggattgatcctaaacaaatcggtcgtctggaagttggaagcgagaccgtgatagacaaaagcaaatccatcaagaccttcctgatgcagatcttcgagaaatatggaaatactgacattgagggtgttgattcaactaatgcatgctatggaggaactgctgctctgtttaattgtgtcaattgggtggagagcaattcatgggatggacgctatggacttgttgtctg

SEQ ID NO: 47164 - DNA, 279 bp, Glycine max
  Clone ID: 701038573H1
actcgagcgaatcggctcaggccaaattgccgaaactggaacacctcctagaataaacctcatttttattttttacgttcaaggccaagaattcaatggcaggtattgcatctggaatcagcacccttgccattggctcaggtgatgctcgacggcgtccagcacaagcccaatccactcccaacactaacactaacacaaacactaacagcaacacttcttcttctacgccatcatctgaagggttcacttatttaaattctgccaagcaagatataa

SEQ ID NO: 47165 - DNA, 280 bp, Glycine max
  Clone ID: 701038545H1
ataaaacctaaacaataattaatagtagttgatcggctttaaatgctgtattttcttctttcctctttccctgtctccattgtctgggtctgttttagctttgcagaggttggccttggcaggcacacgcacatcccacattacatcaaacacatttcattttttttttttctttctcctttgtcatcctcaaaatccccgaccttaattgctccgaccccaacaaaaaacagaacaagcaagccatggattcctcccagatccatggcttgtcctcgta

SEQ ID NO: 47166 - DNA, 283 bp, Glycine max
  Clone ID: 701038522H1
ctaaatcggagtttcagtttcacccctcttttctcatctctaacatcatagtcctcagaggctagtcttcctattatcacaaacaatgtctgacagtcaagaatctgacaagaacattgagatatggaagatcaagaaattgatcaaggctctggaagctgctcgaggtaatggtaccagcatgatttctctgataatgcctccacgcgatcaaatttcccgggtcactaagatgttgggagatgaatttggaactgcttcaaacatcaaaagtagggtgaac

SEQ ID NO: 47167 - DNA, 282 bp, Glycine max
  Clone ID: 701038523H1
accagcaagggccattttctgaatgcgctctatctatctcttccgatctggctactatccctaagccgattcgaaccgtggcttcctcggcctcgcagaacctctctcgaagaaaatcttcttcttcgtcttcgttttctcaacaaacttccgggtcgacccggatcgtttaccgcgaacctcggatcccatcggaatccaattttccgatctggcagcagaactggttcatcgcattgctcttcctcatggctctcggattcttcgccctcgctctcttcc

SEQ ID NO: 47168 - DNA, 285 bp, Glycine max
  Clone ID: 701038524H1
ccgattgctagaatggaatttcgatgctcagtcatctcttttaccattctcttctctcttgctcttgcaggagagagccatgtccatgcatcgctacctgaggaagattattgggaagctgtttggccaaacactcccattcccactgcactgcgagagcttctaaagcctctccctcgcaggtgttgaaatcgatgaactccctaagcaaattgatgatacacagtacccaaaaacattcttctataaagaagaccttcatccaggcaaaacactgaaagtaca

SEQ ID NO: 47169 - DNA, 283 bp, Glycine max
  Clone ID: 701038525H1
tcggctcgagtagcaattaagcttccttttgctagtagctatctctagcttctagttctagccccttcctttgtgaactttttttgtttatccagaagaatatgacatcctggttattgggaaggtctagtaggatcttaattcatcaacaacaacagcttcacaagggaccatttcttaactataatagctcttgttcctcttttcgatcaactgagccatttaggtgccgtgatgcattaccgggtaagaactcgtcacctacccttttccgcttttggcg

SEQ ID NO: 47170 - DNA, 271 bp, Glycine max
  Clone ID: 701038526H1
caagattacggaatactttgaggcaattccaggagtcccatcaattcaagagatgtacaacccagcaacatggatgctagaagtgagttctgtagcagctgaagttcgtcttggaatggactttgctgaatactacaagacatcatctttattccagcgaaacaaagctcttgtataggagttaagcacacccccgcctggagctactgatttgtatttccccaccaagtattctccctccacattggggcaatttaaatcctgtttttgg

SEQ ID NO: 47171 - DNA, 279 bp, Glycine max
  Clone ID: 701038527H1
ctgaataaagcagagaagaataagaaaatgggtgtgttcagtacagtgctgctgtgccttatgtccctaatgtggatggtggatgctcgaattccaggcgtatactctggcggcgcttggcaaaatgctcacgctacgttctacggaggatccgatgcttccggcaccatgggtggagcatgtgggtacgggaacctgtacagccaagggtacggagtgaacactgcagcgttgagcacggcactcttcaacagcgggctgagctgcggacgtgcttcg

SEQ ID NO: 47172 - DNA, 279 bp, Glycine max
  Clone ID: 701038528H1
ctctaatcgtttccctgaaaaaaccctaaaaccagaaaacgttcctcattgaaaaatcccatctttcatttcaacgttcctcaatagcgcattctagtcttcacgagcaataatttttcgattgctttcccaacatgaccgcttctaataagaaaaaccccaaagagaaaccaattcgccgcaaggcagaaaaaccggaagaaccggaagtgccgaaatacagagatcgagctaaagagcgtagagaggatcagaatcctgattatgaacaaactgagc

SEQ ID NO: 47173 - DNA, 280 bp, Glycine max
  Clone ID: 701038529H1
ctctctgttccaaaaccctaatccttcgtcttccaaggagatggctgattctcccctcgcaaggaactcaaggtcaccttccccatggaaagctcagtcgagatcgagatctaggtcaaggtcgagatctaggtcgaggtctaggcctagacaaaggccaagatcgcgttctagaagtcgtggcaggtcaaggtcaccaattcgtggaaggtcaaggtcaccaattcatggaaggtctgaacctacaaatcctggtgacacactttatgtaactggtcta

SEQ ID NO: 47174 - DNA, 281 bp, Glycine max
  Clone ID: 701038530H1
caagaatcagggttatggttgctggaggtgatggtacagttggttggttattaggatgtctaacagaacttcgtgcacagggtcgagagccagttcctccagtagggatcgtaccactggggacgggcaatgacctgtctaggagttttcgttggggtgggtcatttccgtttgcatggaggtctgcaattaagagaactctacaaagggctagtaatgggacagttaatcgtttggatagttggcgagtttcactttcaatgctcgaaggtacacctgtg

SEQ ID NO: 47175 - DNA, 283 bp, Glycine max
  Clone ID: 701038531H1
tcaaaggaggaacacagcactacacagctccgaaataggagggggagaaattttgtatgcgttggatttcgtagatctgattcatggtcagcacatagattgtggtggcagcacaatggatcctggcagtggaggaaacagtcttggcaacaactctaatctcgcttcaaaacaacgtttacggtggacacatgaattacatgagcgctttgttgatgctgtggctcaacttggtgggccagatcgtgccacacccaaaggtgtcctcagagttatgggtgta

SEQ ID NO: 47176 - DNA, 285 bp, Glycine max
  Clone ID: 701038532H1
cgataggttctttgcttggagtgagtgcgagtcaattcttgctggtttctttcgttagccttggaacaaacaaacataccagtcaaaaatcaaaatctcagagttgtttgaacgagaaattgaaatgtctcagaccaagaaattgacgccgaatctggatcagcagagcacgaaggtgctgaatctcaccgtgctccagcgaatcgatccgtacatcgacgagattctcttcactgccgcgcatgtctccttctacgacttcaacatcgaaagcaaccagtggag

SEQ ID NO: 47177 - DNA, 285 bp, Glycine max
  Clone ID: 701038533H1
cgaggcgcagagtagagcagcagagaagagagaaaacggcactgcagccgtagaaggaaaaccgaccatggtgcacgtctccttttacaggaactatggtaagacgtttaagacgccccgccgtccgtacgagaaggagcgtctagacgcggagctgaagctggtgggggagtacgggctgcggtgcaagagggagctgttgagggtgcagtacgcgctcagccgcatccgctacaacgcgcggaatctccttaccctcgacgataagaacccgcgccggatctt

SEQ ID NO: 47178 - DNA, 280 bp, Glycine max
  Clone ID: 701038534H1
tgtccagggtattaacttactttgtttgggagtcctgaaaagcaacaacgtgaacattataggacgtgagtattttaattgaagaaaaactaaattatatctgactatatatgatcttgaagctttcatttcagattactttgtcaattcagtgctcttatcaatatagcagccacaactgctatattcttattagaccttcttatgtttcttctgaaattctttagcattcgccaatgcctgtcttgtttgtctgtttttaagtttaacaaatcacaca

SEQ ID NO: 47179 - DNA, 280 bp, Glycine max
  Clone ID: 701038535H1
cttttataaaaaactggagcgttatttattttcttcttaaccccttcttcctcttgcgcatcgtctcaactcaactggcatttctgaacactctaaaaaaccagagccaaaccccaaacaaaattgtcttctcttctatttctccaattacaactcgtttccctaactcggccgagtcatcatggcgaatcacccttccgaagctcccaccgacgacttcctggagcaaatcctgggcctctcgaccttcgcctccgccgaccccgccgccgacgcctct

SEQ ID NO: 47180 - DNA, 280 bp, Glycine max
  Clone ID: 701038537H1
tgctcttatttacccatcaagcctaaggcacttcacttgttctgcattgaccatagcttctctctttctttcctaattaatccttccatgcaaacaaacgctagactctcatactcatagtgacacacacagcttagtttcgttgtattgtatgtgtcctttctcaattctcatcatatatctgttcaagtaccattatctttctatgttgagtgtcggcattttttgagtttctcactaccacttgttcttgtgttctgatacatgcatatatatacgt

SEQ ID NO: 47181 - DNA, 294 bp, Glycine max
  Clone ID: 701038538H1
tcggaatcggctgacacctcgagtcgagcgttttctcaaaaagttgcaagagtcacagcaaaaaccaaagtgcgagacacaatgatgaagccatcgatgctcagatctcttcactctgccgccacccgcggcgcctcccacctctcccgccgtggctacgcctccgagccggtgccggagcgcaaggtggccgttctaggtgccgccggcgggatcgggcaacccctctcccttctcatgaagctcaaccccctcgtttccagcctctccctctacgatatcgccggaactccc

SEQ ID NO: 47182 - DNA, 276 bp, Glycine max
  Clone ID: 701038539H1
catcatctttagttcttcagtaatttattgtgggattctattctaagattttgagaatgtctagctgtgggtgtggaagcagctgcaactgtggcagcaactgcggttgcaacaagtactcttttgacttgagttacgttgagaagacaaccacagagactctagttttgggtgttgggcctgtgaaggccaatctggagggtgctgaaatgggtgttgcatctgagaacggtggctgcaactgtggatcaagctgcacctgtgacccatgcaact

SEQ ID NO: 47183 - DNA, 122 bp, Glycine max
  Clone ID: 701038540H1
caggcattcttcattctcgaacactctgcttaagctactccagtatacgaagccaccttatctcgagggataaaatcaaataaattgataaatggtgtcgtgcggcttcttacagcgtatat

SEQ ID NO: 47184 - DNA, 283 bp, Glycine max
  Clone ID: 701038541H1
ctttccaatttgaattgttccattttcatttctttcgcaaaatttgcaactacttcctcagataaaaagtatctaagttaaggaaatccagagagatcacaatagccggtcaacgtccagctacatgcatagacatcctccttgacatcatttctcctcctcttggtgttctcctcaaatattgctgctaggtggagttctggatttgtttggtgctgaccctttttggttatatacctggacatatctatgctgtctatgctatcaccaagtgatcaccctt

SEQ ID NO: 47185 - DNA, 283 bp, Glycine max
  Clone ID: 701038542H1
ctttaaacctctctctctctcaaattattcgaaatccaaaaacacaaaaacaagtttcttattataaaaaatgaaacaaatagaaatggaaagtaacgcatcagcactagcaaagaaagtttggagcatggtacgtgtggtgttgttcatgcttcgaaaaggcataacaaaggggaagctcatgatggacctcaacatgatgctgaaacgccgcggcaagctcgccggcaaagccattgccaacttaatgtcgtcccaccaccaccacaaccgcggtgggtcc

SEQ ID NO: 47186 - DNA, 278 bp, Glycine max
  Clone ID: 701038543H1
ctcagtcactcagtctctgcacttgttgtgatgaagaaactctcactcttaccctcggatttggacactaaatgttccactccctcgttgatgagcatgatgggcttttttgtcgcttccttcgtcctctgctctgtggttttctcagtctccattgttcttcgagactctccctcagatgccgccctgcacgaaccctcgtcactcgcagccctcttgcaaatcacacaaactctacgagatttggtcaatgaaacctctgattctgttgagctgca

SEQ ID NO: 47187 - DNA, 279 bp, Glycine max
  Clone ID: 701038544H1
aaaagaacacatggaagtctgtgatcttgatcctaagttgttacaaggttaagtgttccttggaggaatcagagaaacaggttttgaaacaaggttctttccagaggttatgtctatcagatgtgagcaattcaagctccactcaggccattgaagacatttcaatttcatttgctggctcaaagctctatgcattcacacttgaggagctaagggaagcaacaaacagtttctcatggagtaacatgctaggtgaaggagggtttggacctgtctaca

SEQ ID NO: 47188 - DNA, 280 bp, Glycine max
  Clone ID: 701038521H1
accggggcagaggaaggggcagagttttggagtttgaaagagaaaatattgattgcagttgagttctaatgagtaacgaatacgattacctgttcaagcttctcctaatcggagactcttccgttggaaaatcctgcttgcttctcagattcgctgatgactcctatgtcgacagctacataagtaccattggagttgatttcaaaatcagaacggtggagctggaagggaaaaccgtcaagctgcagatttgggatacagctggacatgagcgattcag

SEQ ID NO: 47189 - DNA, 242 bp, Glycine max
  unsure (1)..(242): unsure at all n locations
  Clone ID: 701038486H1
cgagtgtgtttttgcaagacggtatggcgaaggacgttgaggttgctgagcgtggctccttctctgggaaggactaccaggancctccaccagcaccactcattgatgctgaggagctcacaaagtggtccttttacagggctcttattgctgagttcattgccactttgctcttcctctacatacactgtgctcacagttatagggtacaagcaccagacggatcatgctgatgcgtgtgg

SEQ ID NO: 47190 - DNA, 235 bp, Glycine max
  Clone ID: 701038487H1
ctttgttcactcttcttctcttgcggtctggtttagcgcagttcttctagatttaaggcagatgggtaaggcaaaggttcacatcagtattgtggtcattggtcatgtcgactctgggaaatccactaccactggtcacctgatttacaagcttggaggcattgacaagcgtgttattgagaggtttgagaaggaagctgctgagatgaacaagaggtctttcaagtatgcctgg

SEQ ID NO: 47191 - DNA, 238 bp, Glycine max
  Clone ID: 701038490H1
caaatacgaaattccaccgagtgcttctagttctaccaagttagacaatcagcattgcacctaaaccctggctttctccgctttaatttctcgttctctcgccatcaagtccatatacatcgttccagcatggagaagataaaaataaaactactcatgaaggatgaaacatttctccaacacccttttgttcttgctgttgttctggttttaggccttgttatgatggacccttttc

SEQ ID NO: 47192 - DNA, 130 bp, Glycine max
  Clone ID: 701038491H1
acatgcgtttggtgatcactatcgggcgactgacacagtaattacaggagctcggaaagctggaagctggtgtttgttccagcaggccagggtgatgagactgaattcgaggtgttgaacttcactggtg

SEQ ID NO: 47193 - DNA, 121 bp, Glycine max
  Clone ID: 701038492H1
ccagagatggaagaagatggcaagagagacaacactgattcacccaccaattcgcaacacacagtttctgatgatgatgaaatagactacacaaccaaaccagagttttatgacccagatc

SEQ ID NO: 47194 - DNA, 179 bp, Glycine max
  Clone ID: 701038493H1
cgtcaatagcattccgcaaaatggctgccaccaccttagtctctgaagtcactctcccctcctcctccggccagcggaagatgccgctgatgggcctcggcaccgcgccggaagcaaccagcgcggttaccacaaaagatgctgttcttgaggccatcaagcagggctacaggcacttt

SEQ ID NO: 47195 - DNA, 231 bp, Glycine max
  Clone ID: 701038494H1
ctctcccgtcagcaacagcaatgtatgcaccaaccagcatctctgaagatgttgatcatgacccagttagttattttatcaagatattctgtggttcaatcttggcattcatcttgttcttgtcacccaaaatgatcatggcattcaggaatcaagtcatttagaagaattagaaactgtttgctgaattcaatctgcaagcatatagatgaagcctattgatagcaacaa

SEQ ID NO: 47196 - DNA, 232 bp, Glycine max
  Clone ID: 701038495H1
tcgagatcgagccgaatcggctcgaggaaagggctgataatggtgccaatgatggaagaaccagtgccaatcagttccacgggaagccaagacctcaagtagatcctgctcgagacctctctattcaagttttagagaagttttctcttgtcacaagatttgcccgtgaaacaacttcacaactttttggagaaaaccagagtaatggatttagtcccattgacaggaggac

SEQ ID NO: 47197 - DNA, 281 bp, Glycine max
  Clone ID: 701038501H1
ccgctatcttctggaacaaatggctggagtgacaaaggaggaagagaggggtagtcctagttggggtgcttcattttttacgcagacaacagaggatgtggctagagctgttgccactgctatgaattctcagaggccatctgtgtatattcattgaaaaatgatcatggtggcagccaacttcaaaggctgcagtatcaagttacgaaaatgataaaaggattttctagccctccagaagttaaatatacaaattacaatccggaaatcttgacaactca

SEQ ID NO: 47198 - DNA, 282 bp, Glycine max
  Clone ID: 701038503H1
gatctccgcaaccatgagtggtgttacatgctgtcttcgtttccctggtcaactcaactctgatctgaggtaactcgccgtgaatctcatccctttccctcgtctgcacttcttcatggttggatttgcgcctctaacctctcgtggctctcagcagtaccgtgcattgacagttccagagctgacacagcaaatgtgggatgccaagaatatgatgtgtgccgctgatcccaggcacgggcgttacctcacggcatcagccatgttccgtggcaagatgag

SEQ ID NO: 47199 - DNA, 283 bp, Glycine max
  Clone ID: 701038504H1
cttcctttgtaatagaaagcacgcgtttctctctctccctctctcaacgaatatttgtgtacttcctcttttgtgggtagattcaatttaccatgtcgagttcatcggaatactctcaattttccggccagaaaccggcgaggtcgccggagaaatcgagcttctctcagacttgtagcctgttgagtcaatacatcaaggagaagggtagcttcggagatcttaccctcggaatgacatcatgtgggtcacctgagacatcttgtcaatctgctacaaccat

SEQ ID NO: 47200 - DNA, 283 bp, Glycine max
  Clone ID: 701038505H1
actctccttctcgctctttcagctttgacttttgttggaaactaaggcctaatcaaaatggtgaagttcacagctgaagagctacgtcgtattatggactataagcttaatatccgtaatatgtctgtcattgttcatgttgatcacgcaaaatcaaccctcactgattctcttgtggctgctgctggtattattgctcaagaagttgccggtgatgtccgtatgactgatacccgtgcatatgaagctgagcgtggtattaccatcaagtctacaggtatct

SEQ ID NO: 47201 - DNA, 284 bp, Glycine max
  Clone ID: 701038506H1
cttctctttctctttctcttctcttctgtcgaagaagaagacagcagaagtagttacagaaacatgctggagaatcttcaggctcctccgccaacggaatcggccccagtggtgaagcgctatgctcctcccaaccagaggaaccgttctgccaacaggcgcaaatcatctgatcggcttgatcggacaaacagtatcgggaatgacttagaaaagaatcaagttgcttattcaagaagtgttcacattccagatcacggagatgctggtagcagtaatcttct

SEQ ID NO: 47202 - DNA, 284 bp, Glycine max
  Clone ID: 701038507H1
acgtttgtagtgtagcaggaacaagcagcaatggcgccgaagtaacacgcaaggttagcagaaaccccgaattgataaggggaattggaaagtactcgaggtcgcagatgtaccacaagacgggcatttgggctatcaaggccaaaaatggtggcgttttacctcgccacgaccctaaacccaaacctgaaacacccgctgaaaaaccacccaaattttaccctgctgatgatatcaagaagccccttgtcaacaagcacaaacccaaacccgctaagctcagg

SEQ ID NO: 47203 - DNA, 285 bp, Glycine max
  Clone ID: 701038508H1
ttcaaaaaacaatcccttgagatcaccgttgacttgtccaaacgttccattgtctccaccaatgtctacattggccatggcttccccatgctcacgttcgatgagcaagactttgtggccgagcttccttttaagtataaacccttcattgaatcagtgaacaaacgaggccttaatatatctgaagttgtgtgttctactgcctcggttgggtggtatggggagataaagagcaaaaggacactgaagcttcagtgctttcacacacaagggtctataaatttg

SEQ ID NO: 47204 - DNA, 283 bp, Glycine max
  Clone ID: 701038509H1
gctgcatatgcttatgtgaaatcaattcgaccaagggtgcttctagcttcctctcagtggcaagctgtccaagaatactattaccatcttatggttaggagggctgttggatgtgctcccacagccaatctattagtaaaggcttctcagacggcagcaggttcacgagatcttgtgatgtttgatgacaattctgtagtcatggtaacagagtcagatctagaaggttacgacccaagtagtcaatcagccatggcaagtgaaatatgggcagatttaagtg

SEQ ID NO: 47205 - DNA, 285 bp, Glycine max
  Clone ID: 701038510H1
accagatggagcatgtagttttgacaaccaccaccaccattgttgttattgtcaaaaccagatggagcctgtgggtttgtctgatcctaattcgctctattggaacactgcaacgggtttgggtgcttggagtgatcaacctaacaacattggtccttcagtcacttctctgatctagagaaaaagatgaagcatcgttttcaaaaagctacatatgaagaagaagaaagtctctctccctcgtttaattaaggtcatcttttggtccctttaggcttaggtttt

SEQ ID NO: 47206 - DNA, 282 bp, Glycine max
  Clone ID: 701038512H1
ctcaaacattaattatttgtggtgcaagtgcaacttacaactctcattgataatttcttcagtcttcttaatcttacttttattcttcacttaaaatggaaacccttattggaaaaacattcctcacactcttatttccatcttcagttttctcaatagtctcgtcaagtagtggaccagctccatccagcaacatagattggtggtgcaactaaccccacaccctgtgccatgcaaacactacaccattactcaaatgaagagccatcatttccaaatcaa

SEQ ID NO: 47207 - DNA, 260 bp, Glycine max
  Clone ID: 701038514H1
catctccgcaaccatgagtggtgttacatgctgacttcgtctccctggtcaactcaactctgatctgaggcaactggccgtgaatctcatccctctccctcgtctgcacatcttcatggttggattcgcgcctctaacctctcgtggctctcagtagcaccgtgcattgacagttccagagctgacacagcaaatgtcggatgccaagattatgatgtgtgccgctgatcccaggcacgggcgttacttcacggcatcag

SEQ ID NO: 47208 - DNA, 283 bp, Glycine max
  Clone ID: 701038515H1
gcagacaccaaatctaaaatgtggttcagattcctttaccccatcagatcttcgagactttgccaaatctcaggctgattacgtattgggcaagaatcctatgcatatgagttttctggtgggctatggagataaataccctcaatttgtgcatcataggggtgcttcaattcctgctgatgcatcaactggctgcaaggatggcttccagtggcttgagtcatctgatcctaatcccaatgtagctactggagcacttgttggtggacccttcttaaatgag

SEQ ID NO: 47209 - DNA, 282 bp, Glycine max
  Clone ID: 701038516H1
ctcttctcttgcggctagggttttagcgcacttcttctagatttaaggaagatgggtaaggaaaaggttcacatcagtattgtggtcattggccatgtcgactctgggaaatccactaccactggtcacctgatttacaagcttggaggcattgacaagcgtgttattgagaggtttgacaaggaagctgctgagatgaacaagaggtctttcaagtatgcctgggtgctggacaaacttaaggctgagcgtgaaagaggaatcaccattgatattgctttg

SEQ ID NO: 47210 - DNA, 275 bp, Glycine max
  Clone ID: 701038518H1
tgtttgttgttgtaactcgttcttcttcttttgttgttctgtgtttgtgtttgttttttctctcacctgaaaatgtcttgctgcggtggtaactgtggttgcggaagctgcctgcaagtgcggcaacggctgcggaggctgcaagatgtacccagacttgagctacactgagtcaaccaccaccgagaccttggtcatgggagtggcacctgttaaggctcaatttgagggtgctgaaatgggtgtgcccgctgagaacgatggctgcaaatgtg

SEQ ID NO: 47211 - DNA, 279 bp, Glycine max
  Clone ID: 701038519H1
cctcgagcgaatcggctcaggccatataacataatacaaacctatccttgcttcaccttagacatggcaactactacactcatgaagcttgctttcatgcttctcatgaaccttgttatctgcagcgcagaatcttccatcggcagaaagtccaatcctaacccagaagagttcgtgaagtcctcgtgcagggcaacacggtaccctgttctatgcgtcaagtctctgttggcctacgcaagcgtgattcgccgaagcgaccgacaactagccacgacc

SEQ ID NO: 47212 - DNA, 272 bp, Glycine max
  unsure (1)..(272): unsure at all n locations
  Clone ID: 701038520H1
cgcgctagtagtagtccttctcaaagtggaatttgaccctcatgagcatcatctacctaacgttatgattcccattcccatgagcaatattttgcatgggaaagtcaaagtatcaactacggataacgttaggtagatgatgctttgactttcccatgcaaaatattgctcaccganatggaatcataacgtacagactttttttattttatccaacccttcttgtgtagttgcccctcacatagcaacggtatatgtttaattgatcaata

SEQ ID NO: 47213 - DNA, 210 bp, Glycine max
  Clone ID: 701038483H1
agaggcagagaggacgcaacaccacaccacaccgcaccactctctacactctcactctgcaacactcaaatctcgtttccacctaaacgacttcgttttgcgctcttttcccttcttctgatttaggtttcagagggaaaaggagcagcgatggactcacgcacgtataatcctcgcaccgtcgaagaggtttttagggatttcaagggc

SEQ ID NO: 47214 - DNA, 149 bp, Glycine max
  Clone ID: 701038434H1
ggtcacacctcactcactgattctcaaaaactcaaaagatggtgatgaagaaaaaccttctcttctcactttcacttctcctaatggttctcttcacttcatctcaaaccaccccagcaccatcaccttcctcaaccccaacagacatc

SEQ ID NO: 47215 - DNA, 148 bp, Glycine max
  Clone ID: 701038435H1
ccaaaggtcacgttggatatgtagcagaactgcttcatcttctcttctctccgcttccaccaccactcactcactcactccactccctcacaattcacaatcctcacgttgcaccattcacatgaagctcctctcgcgctccgtgttt

SEQ ID NO: 47216 - DNA, 193 bp, Glycine max
  unsure (1)..(193): unsure at all n locations
  Clone ID: 701038436H1
ctcggttctgccttcacaaaaaaattatcgagatcccctttttctcctaagacaagccatggctaagggtcncggtctctactctgacatcggcaagacagccagggatctgctgttcaaggactaccacagtgaccagaagttcaccatcaccacctactcacccactggagttgctataacagcatcagga

SEQ ID NO: 47217 - DNA, 203 bp, Glycine max
  Clone ID: 701038437H1
gaattatttaatgcgcgaaaatgggcagtgaggagaatagtgtgtgatccacttctttcatcgcttcggatcttcaatctcatctccgatctcaaaatgcccgctgtttatggagctccgcttgaccaccttcgaagactccgagaaggagagtgaatacggttacgttcgcaaggtttcaggacccgtcgtcgttgcggatg

SEQ ID NO: 47218 - DNA, 250 bp, Glycine max
  Clone ID: 701038438H1
cctctatcgagtaaattaactatgaagcctaccctactattatccctttccttcctgcctctctctgctttcctggctctttcagaagatgttgaacaagttgtggacataagtggcaaccccattttcccaggtggcacatattacattatgccatcaacttggggcgctgccggtggtggattgaaactaggccggacaggaaactcaaactgcccagttactgttttgcaagattactcagaaatct

SEQ ID NO: 47219 - DNA, 198 bp, Glycine max
  Clone ID: 701038439H1
attcacaaaccctaatctgcctacagagcagaaaggtcgatcttcacaacctggatatggtgatgcagcaggcatgtattcaggagccagggcaggtgggttctctcacatggccaatgctgcggcaattgcagctgcctttgggggaggtttgcctcctggcataactggaacaaatgaaaggtgtacacttcttgt

SEQ ID NO: 47220 - DNA, 245 bp, Glycine max
  Clone ID: 701038441H1
cgcgtgatcgggtacgacaacaccctatggaacggatctgtggtggcaccccctgatgctcctcttaggaagtatgttaggtactacagggcattcgtgctggagctcaacaaagccctcgctgtggaccccaggatcgagatttgcatgctcccggttggtgatggaatcactatctgccgtcggatcaagtgatttctgatcatcataatcgtggaccaccgttgcttcttctgcacacccta

SEQ ID NO: 47221 - DNA, 112 bp, Glycine max
  Clone ID: 701038442H1
ctttggagctgcgatcctctgcttcgatggccaccgtgcaactacgatccctaaaccttgttcgctcctcagcacttccttccgccaccttgtcccctccgatcgccgtctc

SEQ ID NO: 47222 - DNA, 238 bp, Glycine max
  Clone ID: 701038445H1
ctaattttgacatcaaagttgggggtgagatcaactctttcaagtcaaaggagccagcttgtgattacaatgaaaacatgaatggatctcttcttgccgtgccttacaacaacaataacattttgggtgttggtggagttggtctcaatggaggcttcaacaaaggaatttactccaagcctggttttgccaatcttaacaacaatattaacctgaatatcaatcctaagggacacaa

SEQ ID NO: 47223 - DNA, 238 bp, Glycine max
  Clone ID: 701038446H1
tctcagtgtgggaagaacgaagcagaagaagcatctcagaacagaaccaccgaacccactcagaagcaaatccgaaaacccctcatataatagtactggtattcagctgttcatgacaaaagcctgaaccgatcatgtcagaaggtgcagaaattgatgagcgtgtggaccttgacgaggaaaattatatggaagagatggatgatgatgttgaagaacaaatagatgatgatggagt

SEQ ID NO: 47224 - DNA, 184 bp, Glycine max
  Clone ID: 701038447H1
tctctctcttcgtctctattcagtgaattcggatttacttttcctcttcaagctccggccatggcgtctggatcctcgggtcgcggcaactctgcctcgaaaggcttcgatttcgcttccgatgacatcctctgctcctacgacgactacgccaaccgcgattccagttccaacggcaatcaca

SEQ ID NO: 47225 - DNA, 228 bp, Glycine max
  Clone ID: 701038448H1
ccaaaacgcgcaacacgttgtaattaaaacgacaccgaaactaatgggcgtcttcagcgaaaacccgaatccggacccggttgtgatccgccaggtttgggcttcaaatctcgaatccgaattccaactcatccgcgaactcatcgaccactatccttttatctcgatggacacagaattccccggtgttgttttccgaccacacctggaccccacaaaaccctacaa

SEQ ID NO: 47226 - DNA, 190 bp, Glycine max
  Clone ID: 701038450H1
ctcgaagaagccctaactacgcacgcactcattcttgagaaagctcaatattcattcgtccatggcactctcttctcgtctcttttccaaatccacattgatctatggctgtcaaatacttctgcaaaaggagcatgctattccagttcgtcactttgctaaagagtctgcccctcctgcccttaaggga

SEQ ID NO: 47227 - DNA, 128 bp, Glycine max
  Clone ID: 701038451H1
ggataacgaatatgctctttatactgtaacactcttcagtcgtgttgcggataattttagaactagtgcacgtgaaaaagggttccaaattcgtgactttgaatacagtccagaaacacatgagaacc

SEQ ID NO: 47228 - DNA, 244 bp, Glycine max
  Clone ID: 701038452H1
gtataattatggctcttctggtactcagaacttttaccaaagcactggacgaccacctttgccaaaccagatgaagactggtcatggaagtagttctaatcttatcagacatggtagctcacctgctggattgttttcaaacattaacattgatattactggctatgctgctgttgtaaggggcatgggaactatgggagctgctgctaataacaccagcgaggaagcaaacttttcaccagca

SEQ ID NO: 47229 - DNA, 186 bp, Glycine max
  Clone ID: 701038455H1
ctcttgtccatctatcccacaactaatttttgattttccttgtttatttatcttcttcctcccttgtttgtctgtctctttgtttctttggcttgacaagaagaagatgatgatgatgacaatggaggggatgatggacaagggggtgttggatgatgtgataagaaggcttctggaagggaaagg

SEQ ID NO: 47230 - DNA, 241 bp, Glycine max
  Clone ID: 701038457H1
caatgtgcttcgctgttcatctctcccatcacgattgacaaaccctaaccctaaccctaatcacccgaccagcatggtgaagaataaggtccccgattggctcaacagctctatatggtcctcatcatcgccgtcgtcccctccctcctccgccgtcgccagccccttcgaacagccaccgcgtcctccgtctcccgccgtcgtgaccccctttgaaccaccgcctccgcgtcctccgtcg

SEQ ID NO: 47231 - DNA, 239 bp, Glycine max
  Clone ID: 701038458H1
cacccatctacaagtaagcttggaattaagaagcagcaacaataataagtcatgttctagtattcattgtggaataaatttccgttccatttggagcagagttaagcatataatttgttatacaagttctttgaataagagtctgagtgtatcacctctaagctacgatcttcatgactcatatgaggttgcttctatttatttggtggccatttttcaagtgttgttcttactaagtt

SEQ ID NO: 47232 - DNA, 135 bp, Glycine max
  Clone ID: 701038459H1
cagggacttccagttatggtggcagtctgggatacgctcggatgagtcctttcaacaatggcaactctaacagatataccactcctattggcaatagcgggggcaatgggagaagcgattctcttatgaactcag

SEQ ID NO: 47233 - DNA, 124 bp, Glycine max
  Clone ID: 701038461H1
cacaaagcgggttactgtctgttcaagctaccatctctctctctctttcttagtggctccttggcaattaaaatgggccaaggaactttcccaatcaaatctcgatcagtggacgaaggggaac

SEQ ID NO: 47234 - DNA, 204 bp, Glycine max
  Clone ID: 701038463H1
ctctctctctctctcttttcctattctcaatatcccacaaacccttttctctattccatctaaagatccattatttctgcaatttcaatatatgggtcttcattaattcactaagattctgcataaatcatcgtttccattgaagtttctgttccgatggagttaatttcgggattgccagaggatgttgcccgagactgttta

SEQ ID NO: 47235 - DNA, 83 bp, Glycine max
  Clone ID: 701038464H1
aagctgccattgcatgccatcacagtactccatggacttgtatgctgcttacctagttgggagattctcgcatgaacatgcag

SEQ ID NO: 47236 - DNA, 186 bp, Glycine max
  Clone ID: 701038466H1
gaagtttgtttattctgagaaggaagagagaatagaacgccatggatgagatattgaacaaggtggggtcttactggttctccaagaaggccagcaaggaatttaactctgtcggcgatgatatcaactcactgtcaaccagtattgaagggggaaccaaatggttggtcaacaagttaaaaggaa

SEQ ID NO: 47237 - DNA, 189 bp, Glycine max
  Clone ID: 701038467H1
ctcaagacagaatcactgttatggaggattcagagcaaaggaagacaaggctgaaagaacatgcgcgtgcaagctgatcaagctgaagtttctggtggtgtgcaaggttctgtggtgcctggttttctctcaaatcccctgatggaagctccttcaactatgccatcacaggataaatcatatgctgct

SEQ ID NO: 47238 - DNA, 78 bp, Glycine max
  Clone ID: 701038470H1
cgaattattgtcatggctaagagctcattcaagatggaacacccacttgagaggaggcaggctgaagcatctcggata

SEQ ID NO: 47239 - DNA, 134 bp, Glycine max
  Clone ID: 701038432H1
cggcagcagacattgctgccatcaagtactccatggacttgtatgctgcttacatagttgagagcttaaggcactaacttctttagaaactgaatagccaatttcagtgatctccaattatgtaaaatgtggat

SEQ ID NO: 47240 - DNA, 244 bp, Glycine max
  Clone ID: 701038471H1
caggaaaaccctagctagtagtctcagttcgtttgagagagaaaaaatggcagagggtctcgttctccgcggaaccatgcgcgcccacaccgacgtcgtgacggcgattgccactcccatcgacaactccgacatgatcgtgacggcgtcgcgcgacaaatccatcattctctggcacctcaccaaggaggacaagacctacggtgtcccccgccgccgcctcaccggacattctcacttcgtc

SEQ ID NO: 47241 - DNA, 134 bp, Glycine max
  Clone ID: 701038472H1
gattttagtatcactgttgagagggaacgagttggactcggaggcgactcgggagaattgcgtggcggcgctttacgcgctgagtcctagaagcttgacgttcaagggtttggctaaggaagcgagagtcgcgg

SEQ ID NO: 47242 - DNA, 237 bp, Glycine max
  Clone ID: 701038473H1
atctgagatcggaaaattcagctctcgaatccccaatcccatcgttgcaaatgatccgattcattctgttgcagaacaggcagggcaagacccgtcttgccaaatactacgttcctctcgaggattccgagaagcacaaggtggaatacgaggttcaccgcctcgtcgtaaacagagaccctaaatacacaaatttcgtcgagtttcgtacgcacaagataatatacaggcgatatg

SEQ ID NO: 47243 - DNA, 236 bp, Glycine max
  Clone ID: 701038474H1
tatttaatgcgcgacaatgggcagtgaggagaatagtgtgtgatccacttctttcatcgcttcggatcttcaatctcatctccgatctcaaaatgcccgctgtttatggagctcgcttgaccaccttcgaagactccgagaaggagagtgaatacggttacgttcgcaaggtttcaggacccgtcgtcgttgcggatggcatggctggtgctgctatgtatgaactcgtgcgtgtt

SEQ ID NO: 47244 - DNA, 61 bp, Glycine max
  Clone ID: 701038476H1
cggtgatgtcagaggaagaggcctgatgctaggagttgaacttgtcactgatcgtgaactt

SEQ ID NO: 47245 - DNA, 190 bp, Glycine max
  Clone ID: 701038477H1
cgcgggtgcggtagaacccttccactgtggtgactctgcgatggatctgatgcctgaactgaacgattatttggtttaattgttctgctggagctttcttaagacggtttggcgttttaacgccaaagccaaaacaggagaaagaacatcatctcttcgctaacttgaactagcatggatgtttgctact

SEQ ID NO: 47246 - DNA, 183 bp, Glycine max
  Clone ID: 701038481H1
gtaattaacataaacacagaatccaagaggtattgcaactggaattccatggcgacgagtgggtcagagacaaagcaagtgatggtgattggaatcgacgacagtgctttcagcacgtacgctctccaatggactctggatcacttgctatcccctgcaaatgttcctaagttcaagattttt

SEQ ID NO: 47247 - DNA, 159 bp, Glycine max
  Clone ID: 701038482H1
cgacagtgaaagagcttcttcctctaattcgagtgtacaaggatggcagcgtggagcgtcttctaagctctgaaaacgtggcagcctcccctgaagatccccaaactggagtctcatccaaagacatagtcatcgcagacaacccctacgtctccgctc

SEQ ID NO: 47248 - DNA, 136 bp, Glycine max
  Clone ID: 701038383H1
tgtcacactcctgaacccgcgccacgtggcagtgatcggcgcgggcacctcggcctagtggcggctcgggaagtccggcgagaagggcatcgcgtggtggttttcgagaaaacggcaccagtgggtggcatgttgg

SEQ ID NO: 47249 - DNA, 134 bp, Glycine max
  Clone ID: 701038385H1
ggtcctagattcattttaatcgtaattctgcacttcttgatcattcgatttttctcctcaagatgcagatattcgtaaaaactttgaccggcaagaccatcacccttgaggtggaatcctccgacaccattgac

SEQ ID NO: 47250 - DNA, 100 bp, Glycine max
  Clone ID: 701038386H1
cggacaattattaaattccaaaattcaatttttattaaccaaccttttttaaggaaaattcagttaattccaaaatgtggacaatcatccacaaggttaa

SEQ ID NO: 47251 - DNA, 132 bp, Glycine max
  Clone ID: 701038387H1
gcggtttttagcatatatggatactggggaatgtaccttcttggtgttcatttgggaaactatcttatcttcggaagccattcctctggatttagaagtagcagatgggtaccgatgaaggtttgggttctc

SEQ ID NO: 47252 - DNA, 102 bp, Glycine max
  Clone ID: 701038389H1
gtttagcttagcgcatgaccttaggtgggagataagtctgctagattcatccttcgtattaaggacttctctttgaaggctgtgatcttatggagcctgaca

SEQ ID NO: 47253 - DNA, 131 bp, Glycine max
  Clone ID: 701038391H1
gcattccgcaaaatggctgccaccaccttagtctctgaagtcactctcccctcctcctccggccagcggaagatgccgctgatgggcctcggcaccgcgccggaagcaaccagcgcggttaccacaaaaga

SEQ ID NO: 47254 - DNA, 127 bp, Glycine max
  Clone ID: 701038393H1
ctttgctgaaaataacaagtctgaagagaaggttaatgaagcagtggaagatgtacgacatgagctgcaagacactggagagcgtggttcaaagagattaaggagtagtgaccaggaagctctgaag

SEQ ID NO: 47255 - DNA, 104 bp, Glycine max
  Clone ID: 701038395H1
ctgaaatctgtggtggggttggcattcttggcattgcatgggactttggtggcatgatcttcatccttgtctactgcactgctgggatctcagggggtcacatt

SEQ ID NO: 47256 - DNA, 227 bp, Glycine max
  Clone ID: 701038401H1
caaacaaaccaaggacgagaacacgatgttgcttgaacttgcacttggtttattggttttggctctgtttctgcacttgcgtcccacacccactgcaaacccaaaagcacttcgccatctcccaaacccaccaagcccaaagcctcgtcttcccttcataggacaccttcatctcttaaaagacaaacttctccactacgcactcatcgccctctccaaaaaacatg

SEQ ID NO: 47257 - DNA, 160 bp, Glycine max
  Clone ID: 701038403H1
gagctcatttttttcattaacctaataaaacacgatgagcacttctcaacaacgttatctcctcttcgctttcacaacgttaatagttgtcttcagcttcaacacttcaccagtctcagctcgtttattccccaacgtgtcttccatcccaacctggaat

SEQ ID NO: 47258 - DNA, 258 bp, Glycine max
  Clone ID: 701038404H1
ataagcaaactggtcagtctgagggatatggattcgtggagttctattcacgagcgacggctgagaaagtcttgcagaactataatggcacgatgatgcccaatacagatcaggcattccgtctgaattgggccacattacgctgcgggggaaaggcgttcttccgatgctacttctgatctctctatatttgtgggggacttggccattgatgttactgatgctatgctgcaagacacttttgctggccgatattcg

SEQ ID NO: 47259 - DNA, 256 bp, Glycine max
  Clone ID: 701038405H1
caaaggggatcgctgaaatcaattagtctggttgtagtgggaaaagaaaagacaatgaaaatgggtggtgggtgcaagtgcttggtatcgttggtgttggctttggtgttgatgaggagtttggcggacgcgcaatcgggcaccagcaccacttgcgcccaggagctaattccatgtgtgaactttctgaatgggacaaccaccccaccaagctcttgctgtgaccctctcaaacaaaccgtggaaaaccaactgg

SEQ ID NO: 47260 - DNA, 254 bp, Glycine max
  Clone ID: 701038406H1
tctatatagctaaagacagtgatactattaagcataattaatataatggggtacatgtgcattaagatttcgttttgtgtgatgtgtgtgttggggttggtgatcgtgggtgatgttgcctacgctcaagattcagcagaagactacgtgaatgcacacaatgcagcacgagcagaggtgggttctcaatcaccaagacaaacagtgattgttccaagtttggcttgggatgatacggttgctgcttatgcaga

SEQ ID NO: 47261 - DNA, 255 bp, Glycine max
  Clone ID: 701038407H1
gaaaccagattagaggagtagtttgtgttgcgattgacgacgacgataacgacaacgacgaagcatcatgtcttccggcggcggcggaggcggagcaaagccgttcttctgccacgtgtgcagtcagaggatcacgtgctccgatgagtcggaacccttctgcccgatctgtatggaaagtttcgtagaagaatgcaaccctaacaaccctaaccctaatcttttccccgagaatgaggaatcttctgattccga

SEQ ID NO: 47262 - DNA, 148 bp, Glycine max
  unsure (1)..(148): unsure at all n locations
  Clone ID: 701038409H1
ggctaatctgtgcgtatcaggttttgctcctttcaattttctgtttatttcattcattccgctgctgaggtcaagccnatcacactgggcgcccacttttccatgggaaactgcttctccgaagtcgccgcaggcgcgccgccatcgg

SEQ ID NO: 47263 - DNA, 179 bp, Glycine max
  Clone ID: 701038412H1
tcagccaacagtggatcaaggtacaatgagagctgcgagctcttgctcctgtagaggcttaatataggataggtttcaaaataagagggttttgtggcatccttggtgttgcattgagctttgatctaattgttcttgaacaatgttcatttccaaatgagtttactttgttggttaaa

SEQ ID NO: 47264 - DNA, 186 bp, Glycine max
  Clone ID: 701038413H1
aaacataattaacatgtcttcaagttccggtactagtgccacgccttaccccatcaaaacgattgtcgttttggttcaagaaaaccgttcctttgaccacatgttgggatggatgaagtccctcaacccggaaattgacggggtcaccggtttggagtcaaaccaggtttccacattagctccaaa

SEQ ID NO: 47265 - DNA, 231 bp, Glycine max
  Clone ID: 701038416H1
tcagcaacaagggtcagatccaacaaagcaatcaccggcaaccggttttccggtgagctatagcaattcaacaacgtattcgaccaacgaggcttcctacgctccagtcccacctccccagcccaaacctcttgtcgattggtccaccggcctctgtgactgcttctccgaatgtggaaactgttgcatgacgtgttggtgtccatgtgttacctttggccgagttgcaga

SEQ ID NO: 47266 - DNA, 191 bp, Glycine max
  Clone ID: 701038418H1
atcgtgtatgatctctaaataatatgtggagttgtgtgtgtgtggagtactcttacttgataattttcatgtctgcaattgcaagtgcaagtgccgtcgaaccgtgccactagaccaaaaagtgtttttgttgttgccaccatgtgtgtgcaagatggtgaacaagctggtgaagatcatatagagaagac

SEQ ID NO: 47267 - DNA, 224 bp, Glycine max
  Clone ID: 701038420H1
aaccctttgagagttagaatggctgctgctacggaaatccccacaatagtgtttccaaactcctctgcccaacagaggatgccagtggttggaatgggatctgcccctgacttcacatgcaagacagacacaaaggaggctatcattgaggccgtgaaacagggttacagacacttcgacactgctgctgcttaacgctctgaacaggctctcggtgaagctct

SEQ ID NO: 47268 - DNA, 194 bp, Glycine max
  Clone ID: 701038421H1
gctcgagttatagaggcaagagaaatcataagagagacagaaccataccttggtggcagcattgacggaaaggataatggacctgaacttggtatttgggaattggatctaagatctcagttccctgttctatttgaaccctacaaagaagtgcgggacaagattccccattctgaagttattgaaaagtgcac

SEQ ID NO: 47269 - DNA, 258 bp, Glycine max
  Clone ID: 701038422H1
cttggtgcaaagcatcctccgtttcaatttctctctctcagcgctttctgcaatcgaacctttcatctccaaagggatccacaggccgaaggagaaatggggctgacattcacaaagcttttcagtcggcttttcgcgaagaaggaaatgcgaattctgatggttggtcttgatgctgctggtaagaccactatcctgtacaagctcaagctcggagagatcgttaccacaattcctaccatcgggttcaatgttgag

SEQ ID NO: 47270 - DNA, 130 bp, Glycine max
  Clone ID: 701038382H1
agatcgagcgaatcggctcgaggctaacctcgctgttgtgaatagacgtgctgaatcaatagctctcggttttcgcgtaaactagtcgttcatcccaaaatggtttgcttggcttgtttgctgccccttt

SEQ ID NO: 47271 - DNA, 255 bp, Glycine max
  Clone ID: 701038423H1
gaggaggaggagaagaggaagcaactctggagttcacaccctctcactccctcacttttcttttccttagatctcatctaatccaccacccctcgtcctcgccttttgttttgtttttcactttttcagaacaaggtacctttattatctttggaagcacttcaccatcttcacatcttcatttttgtcctcgctgtcgtacacgtctccttttccttactcaccgttgtcttcggaggcgccagaatacgtcat

SEQ ID NO: 47272 - DNA, 185 bp, Glycine max
  Clone ID: 701038424H1
cagaatcctggtctctgtctactcttcaattattcccaacctctcacctcttcatcttcttcttccttacctttgaccagacacagagcagcactcacattcacaacgaaggtttcctattcatcagacatggtgaaggcaatcagagttcacgaactcggtggccctcaagttctgaagtggga

SEQ ID NO: 47273 - DNA, 185 bp, Glycine max
  Clone ID: 701038425H1
acctgcaaatcttcattgaagaaatggcattactgatgtggtggattgctattcttttgttgagatatgtactccattcaccttatatataacacgatgcctgtatgatttattcttggttggtatattttcaccatctatgactctgttgatgccctactactactgggaggaaccacgagtga

SEQ ID NO: 47274 - DNA, 249 bp, Glycine max
  Clone ID: 701038426H1
cgcagagaaatgagaattgggcattggctcagtccttctgaggcaggtggcgctgccaaacgcagaacctccggcagaaattgccaccgcaaacacgtggaagacgggtagtagtactccataccccattctctcatattccctttactaattaaagatcatgaacagcgagagacagtcgacgacgacgacgttgctgcacggcaagtacgagctaggtcgtgtgctgggggcaggaagcttcgccaa

SEQ ID NO: 47275 - DNA, 192 bp, Glycine max
  Clone ID: 701038428H1
cgattctgatctctgggacttgccctcggcgcagttgaacccgctgcttgcagaatcagagccaccggttgacttggaacttgcggtctcgcattcggaatcccaggacgtcgatttgaggaaattcgacatccgttcggctctcaacgaggtgtttggacaattagggtttggggcggttgacggaggagg

SEQ ID NO: 47276 - DNA, 248 bp, Glycine max
  Clone ID: 701038429H1
ccaaggtgctgtgaaggatattgctgcttcggttaactggcttaaagcaaatggctcaaagaaggctggtgtaactggattttgtatgggaggtgctctctctattgccagttctgtcttggttcaagaggttgacgcttctgtagcattctatggagttcctgcttctcaacttgctgaccctgcacaagccaatgctcctgatgatgctcattttggagagctggacacttttgttggcttttcag

SEQ ID NO: 47277 - DNA, 142 bp, Glycine max
  Clone ID: 701038431H1
aacagcagacaagaaaaatggagattgaggacacatcaagtagagtatctattgcatttcctcttggcttagctcttcttgttgcctgtgtgcgagttctcatgttgcttctattgttgctgcatgcactgggaaaaactcc

SEQ ID NO: 47278 - DNA, 151 bp, Glycine max
  Clone ID: 701038317H1
tgaactctttttccttcaagtcactaagataatggcaagcatttatgacattccatcacacataaaagctcgggtctattatgaatatggaaacatagaagagcttctcaaatttgaatctaacatacccataccagacatcaaggaagac

SEQ ID NO: 47279 - DNA, 158 bp, Glycine max
  Clone ID: 701038318H1
ttcggctcgatggcatcactaccccaaatgtctaccacattaggagcttgcatgagctcaaacaagactatcaacccacgaccatgcattgcccaattaaacaacaacaacaacaacaagaggagtactcctttcagcaatttaattgtcaatcacca

SEQ ID NO: 47280 - DNA, 144 bp, Glycine max
  Clone ID: 701038319H1
cgaatggagatgcatgtaggggctgtacaacctggagaacgagccttaatcatagatgatcttattgccactgggggaacgttaggtgcagcaattaagcttctagaacgtgttggggtgcatgttgtggagtgtgcttgtgtg

SEQ ID NO: 47281 - DNA, 143 bp, Glycine max
  Clone ID: 701038321H1
ctttgaaggaattggttatgcttcgtttacggaggcacgagctattttgcaaagggcaattaaccaagccgtgcaagggtatcctattatttggtccccctggaacaggtaagacaatgcttgcaaaggcagttgctaccgaa

SEQ ID NO: 47282 - DNA, 129 bp, Glycine max
  Clone ID: 701038322H1
ctacacttgttcctcaccaggagactcttgagtcaaaggttactgagtctaaggccatggttaaatttcaacttaagacagtgctctgcatgggagtagctgtgggcaatgttagtatggaggaaaagc

SEQ ID NO: 47283 - DNA, 140 bp, Glycine max
  Clone ID: 701038326H1
ctgggatgatatggagaagatttggcatcacacattttacaatcgagttcgtgttgcccctgaagaacaccctgtacttcttaccgaggcacccctcaatcccaaggccaacagagagaagatgacccagattatgtctg

SEQ ID NO: 47284 - DNA, 138 bp, Glycine max
  Clone ID: 701038328H1
gaaattaccagttactatactctctctttctgaaacaatttgcccaattgtttgagatgttcaatatgagatctgtatctcaagattgggtggtttcatgtgcactaatacttctggtgtcatgcacaacatactcat

SEQ ID NO: 47285 - DNA, 140 bp, Glycine max
  Clone ID: 701038330H1
ccttaagcttcctaagaatcttttggcaaaggtttccaccatcaagaatacagagcaggttttggagcagttgcctggggtgatatcatctcttgacgcacacatggaaaatgggttgcaaaatgttccacatctagaga

SEQ ID NO: 47286 - DNA, 139 bp, Glycine max
  Clone ID: 701038332H1
tcactggattaataattagcacatagttttttggacgacttgtgaaaatcggacttgtggagcttttggagtggcatctatgcccgtgatcaaagtactaatactcactgcagttggcatgcttcttgcactggataac

SEQ ID NO: 47287 - DNA, 149 bp, Glycine max
  Clone ID: 701038333H1
gcataatcgctgacgcagatgcaaacatcgaaggagaacgcgatgctttgttcctcttttgttcttccccttcccaatcttcaactttagggttcctttaatctcgttattcctcttcactcccaagctccgttcactccaacaacact

SEQ ID NO: 47288 - DNA, 147 bp, Glycine max
  Clone ID: 701038334H1
ccggcgaacgaaatcggtgacagacaagcaacaagcaatctcgatccccaaatcgtgaaatccgatgacgaccgctgcaagacccacatgggcacctgctaaaggtggcaacgaacaaggtggtactcgaattttcggtccctcaca

SEQ ID NO: 47289 - DNA, 141 bp, Glycine max
  Clone ID: 701038336H1
attgattattagtggttaaggttgttggaggagctctaacaagagatatggagacacaaaattggttcgagagattgaagcctttcgcagctgtggtatcaatacagtttggatatgcagctatggatgttctatccaagg

SEQ ID NO: 47290 - DNA, 136 bp, Glycine max
  Clone ID: 701038339H1
ggcatttcaatccccagtttcttcttcaacgtcctcttacgagcagatcccaattctccttcccagtttcaaagcctaattccctcattcccatggcctcagaagagcccagtgtcgcggtgggacccggtcccga

SEQ ID NO: 47291 - DNA, 131 bp, Glycine max
  Clone ID: 701038342H1
cagaaactcaaaagcatggggtcttctagttatttcttcacttccttgcttctggttgtagtgttcaatctggctaaagggcagcctctggtccctgcattgttcatatttggggactctgctggtgatgt

SEQ ID NO: 47292 - DNA, 135 bp, Glycine max
  Clone ID: 701038343H1
cattaatcaaacatggctagggttagtgctttgtttcactctttgctcttgatttcttcccttgtattggcttctcaaatccatgtttcctctgggaaactagtccctggactatcatggaattactatttgttg

SEQ ID NO: 47293 - DNA, 139 bp, Glycine max
  Clone ID: 701038344H1
ctcaacagaggagcagcttcatgtgcagaggaagcagagcttgtgcttaacacagttgacagcagagacattgcctagaggtctccactgtcttccgttgcgccttacaactgagtattatagcttgagtacttctcag

SEQ ID NO: 47294 - DNA, 140 bp, Glycine max
  Clone ID: 701038345H1
caaaaggcaggtgattgtatggggcttgccaaaaagtgacagacagaggtaaagcagctatagaaatggaacacaagacaagtctccaagcatcctaaagtatgatggagtggatttttgttgaaggatatgattagaga

SEQ ID NO: 47295 - DNA, 142 bp, Glycine max
  Clone ID: 701038347H1
aattaatcaaacatggctagggttagtgctttgtttcactctttgctcttgatttcttcccttgtattggcttctcaaatccatgtttcctctgggaaactagtccctggactatcatggaattactatttgttgacatgtc

SEQ ID NO: 47296 - DNA, 141 bp, Glycine max
  Clone ID: 701038348H1
cgcatcgcagcctgttccagcattcgggctttccgctggagtcggacttggcaacgctttcgtgttggagatcgtgatgaccttcggtttggtgtacacagtctacgccactgccgttgactccaagaacggcaatttggg

SEQ ID NO: 47297 - DNA, 144 bp, Glycine max
  Clone ID: 701038349H1
cacaaaaccgccttcgaaaccgagcttccggaggacggcgtggattgcgtgggcacaggccaagacgtggaatgcctcgttaacacggtagagcgacaatcggaaccatcatcatcgtcatcatcatcatcatcatcgtcatcg

SEQ ID NO: 47298 - DNA, 142 bp, Glycine max
  Clone ID: 701038350H1
ctcgagccgatcacattggtctttcctgtgtatcagaggaaagccatggggatctcaatacaggaatagcttagtgtatgtactgctgttgtttgcattctgtgaaatgcaaatcattgacggaaaagacactctaacctgc

SEQ ID NO: 47299 - DNA, 141 bp, Glycine max
  Clone ID: 701038351H1
gcattccgcaaaatggctgccaccaccttagtctctgaagtcactctcccctcctcctccggccagcggaagatgccgctgatgggcctcggcaccgcgccggaagcaaccagcgcggttaccacaaaagatgctgttctt

SEQ ID NO: 47300 - DNA, 117 bp, Glycine max
  Clone ID: 701038353H1
cgagcggcatcgagcggctcgagtccagcgcttgtttcttgctacgtttcttcaccatgtcaactgctgggaacatcaccactgaaatcggggatcatgcaaccgctacaaagtggt

SEQ ID NO: 47301 - DNA, 134 bp, Glycine max
  Clone ID: 701038354H1
gcaacacatcatctctagctctgtattttgcactattgcatactgttgtaaccgttgacttcagttccttcgatggaattcgtggcttcttcttcttccttctcacagtcggaatcttcatcatccttctcaaa

SEQ ID NO: 47302 - DNA, 147 bp, Glycine max
  Clone ID: 701038315H1
ctcaacactcattaattgcaagaatggcacttcgttgcttggacatgtccctttctgttctcttcactcttggtcttgcgagagaaagccatgccagagacgaagatttttggcatgctgtttggcaaacactcccattccaagttc

SEQ ID NO: 47303 - DNA, 99 bp, Glycine max
  Clone ID: 701038355H1
ctctaattacactttctatctcattttcgttcggttcaaacactctcatggcatcagacaagaagattaggatcggcatcaacggatttggaaggattg

SEQ ID NO: 47304 - DNA, 135 bp, Glycine max
  Clone ID: 701038357H1
gaggaaaatggcgggtacggtttcgacttgtttcttcttcgtgtttcttctttctctccttcttccttttcagatctccgctgaggaatcctcggagaaggagttcgtactcacattggatcactctaactttca

SEQ ID NO: 47305 - DNA, 136 bp, Glycine max
  Clone ID: 701038359H1
ctcgagttcttggtgtcttggcgatgtcaaggtccataggtgatagatacctgaaaccatggataattccagaacctgaagtcaatattgtgcgtcgagaaaaaaatgatcagtgtcttattctagcaagtgatgg

SEQ ID NO: 47306 - DNA, 136 bp, Glycine max
  Clone ID: 701038360H1
ctgcactccaattggaaaaaagaagtgaacttgcgatctgggtatccaattttcgaactctttcgatggggaatgatgcagggtcaccgccaggtccggttacgtgtgggtcgtggattcggaggcccgagaattt

SEQ ID NO: 47307 - DNA, 138 bp, Glycine max
  Clone ID: 701038361H1
cgtttatggaggatcaaagcggagaagctgaaggacaagaacaacaaatacaaccttcactctttcatcatttcattatttaataacaattattattctcaatgggcaagactcctttctcctttcgtcgctccgcct

SEQ ID NO: 47308 - DNA, 134 bp, Glycine max
  Clone ID: 701038362H1
gcaggctttcttgctacttattattagcagaaagatggctcctactcttgcccttcagtttctttctcttttccttttgtccattatgaatggctaatgtcatcggagctagagatatgaaggtagacctgcga

SEQ ID NO: 47309 - DNA, 139 bp, Glycine max
  Clone ID: 701038366H1
ctttgttgttcgaagccaaaaccctagcagccggcgagaatggcagacgttgaggttgatgcggcggcagccgcaggggcagcgcaccgaagaagagaacgttcaagaaattcagcttcaggggcgtggatctggacgc

SEQ ID NO: 47310 - DNA, 138 bp, Glycine max
  Clone ID: 701038367H1
ggaacactgtaaaatattagtcttggcttctttaatgtctattttaaagtggaagacttgtgtagtaaaagggtctgcatctagtactcccaataaaagacaaaaaagagaagcaaattccttcttccttaatttact

SEQ ID NO: 47311 - DNA, 130 bp, Glycine max
  Clone ID: 701038368H1
taagcgatcaacagacagaagattttgcttcatcatctcaacccttcatcatccacccaccccaacgaatcatcctccctccatgcttcagcatgtgtggcgggggatagcgctgcttatcaaaggacat

SEQ ID NO: 47312 - DNA, 135 bp, Glycine max
  Clone ID: 701038370H1
cgaatatgagcagcagtgcagggaagttggtgtgtgtcaccggtgctgccggttatattgcttcatggattgtcaagttcctacttgaacgtggttacactgtcagggccactgttcgaaacccaaatgatcaca

SEQ ID NO: 47313 - DNA, 136 bp, Glycine max
  unsure (1)..(136): unsure at all n locations
  Clone ID: 701038371H1
cccagtgccagtgtattacggtggagaaaatgaataccanaggggaatcatccctcctaacgccgtgtttggagatccaaagggcatccccatccagcaaaccatttacagggacactcctgctcctttcaactgc

SEQ ID NO: 47314 - DNA, 136 bp, Glycine max
  Clone ID: 701038372H1
gtttcaagagcgttagttagggataatagggcagggaagaataagagggatgtacaaagatagagagcgagttggtgtttctgtttccgcttccaaatcggaggatcggaagcgaatcaacgacgttctcgataag

SEQ ID NO: 47315 - DNA, 135 bp, Glycine max
  Clone ID: 701038374H1
tggaaaagagaacttcttgctgcaatacctgttgaggtgagatcttttcacaattcattttcccgtgacttctcttaatttaactcaattcttggacctttattttcatttcagctctttcatcgttagcgttag

SEQ ID NO: 47316 - DNA, 112 bp, Glycine max
  Clone ID: 701038376H1
gtgaacaagtatttaggagctatcgacgaagactgtgatgttagcatgatagtcaggacaaagattgcactgggggtctccactggcttactatgcgagttacacgtgagta

SEQ ID NO: 47317 - DNA, 133 bp, Glycine max
  Clone ID: 701038377H1
caggcgaggagaaagatggaggggaaggagcaggatgtgtcgttgggagcgaacaagttccccgagagacagccaattgggacggcggcgcagagccaagacgacggcaaggactaccaggagccggcgccgg

SEQ ID NO: 47318 - DNA, 131 bp, Glycine max
  Clone ID: 701038378H1
cgacagctttggttgtcttgtttttgcttgtgttgattctaaaggagtcgatcatgggacgtaagacttcaaaacggtctgaaagaaggcatgtgtcatcatatggacctgctggctcctcatcttcacgg

SEQ ID NO: 47319 - DNA, 137 bp, Glycine max
  Clone ID: 701038379H1
cgtggattcaaccaaaatcgagatagaatataacgcaattggttgtattctccgaacctttttttcttgtgcgtgtccagttatttgtacgtgatagaattagagagaaagagacaaattgagttttgtgtttgatc

SEQ ID NO: 47320 - DNA, 169 bp, Glycine max
  Clone ID: 701038276H1
ccaagttcaagaattgtggacctcaccacagcacactcatacagagtacttagatctggaagtgcaaaggaagagacagttgacatcttggagaagcattctttcgttgaggcagagaccacgtaatataagttgtgattcatttgcagtgtcacgttctagtctatgc

SEQ ID NO: 47321 - DNA, 276 bp, Glycine max
  Clone ID: 701038277H1
ctcaggtactgcgtttcggaagcagacacagatggctcgtacgaagcaaaccgctcgtaagtccacaggaggaaaggctcctaggaagcagcttgcaaccaaggctgcacgtaagtctgcaccaactactggtggtgtgaagaagccccaccgtctcatcgtcctggtaccgttgctcttcgtgaaattaggaaataccagaagagtaccgagcttttgatccggaagctccccttccagaggctggttcgtgaaattgctcaggacttcaagact

SEQ ID NO: 47322 - DNA, 276 bp, Glycine max
  Clone ID: 701038278H1
ctaaaccctatggccgacgaagccaaagccaaaggcaacgcagccttctcctccggggactatcctgccgccatccaccacttctccgatgccatcgccctggctccctccaaccatgtcctctattccaaccgatccgccgcatacgcctccctcaaaaactacgcagatgcattagcggatgccaaaaagacagttgaactcaagcccgactggtccaagggttacagccgtctcggtgccgcgcatcttggcctttcccaatacgatgatgct

SEQ ID NO: 47323 - DNA, 275 bp, Glycine max
  Clone ID: 701038279H1
gagccgctcgagccgcaaaattacagacgattggacattcactcactaataagatttccccatttaacaatattttccaaagtccaaagtcaaacacattcaatgattcaaatagcatcgtgtgttcactctgtttagtagcatccaaaatggcgcattcttctgtaatagtcttcctctgaactctccttctcttctttcctccgtcaattcgtgcctccaacgatgacgtggcgctgcacgcgaagaagctcatcagagacctcaacttgttc

SEQ ID NO: 47324 - DNA, 279 bp, Glycine max
  Clone ID: 701038280H1
attgaatagcgcggttaaaaaccgcggttgacagctataacctttcatgtggaaatagcgttcctttcacacttgcgttcttgccttctttctccttttcacgggctttctcttcttttcctctggcttcatcatcatctctctatctgcaccccttttgagaacttcaacttgttacttaattactctactctcccctttctagcttctgtgttcttcttcttcggttctctcttcatggggtgctgcttaagtgccaggatcaaagctgagagccct

SEQ ID NO: 47325 - DNA, 281 bp, Glycine max
  Clone ID: 701038281H1
gacgcttctcaggaaatccttccagcttcctcgcaacaacatcggtcacattatggagattggctctccaacgaacgtgcgccatgttgcgcatgtcacctttgataggttcaatggtttcttgggcttgcctgttgagtttgaacctgaggtccccagaaggcctcctagtgctagtgcatctgtttttggagtttcaacagaatccatgcagttgtcgtatgactcaagagggaacagtgtgccaacaatactgctgtcgatgcaaaggcatctgtatg

SEQ ID NO: 47326 - DNA, 281 bp, Glycine max
  Clone ID: 701038282H1
cgaacggcgagcgtagtcgcaagagacgcaacagaatagaacgacgaataggcgtgcagggaaaccatttcattttcgagcgcgtcgctttcgaatccaatggccttcaacaacgcactgagatctgccgcgaagtcgtcgcttcttccgaatcttccttctctaactcagtgagcagaggttttcattcaactggcatgaagaggatgggaggtggacatggtcatgatgagccctactatcttcatgcaaagcacatgtacaacttggacaagatgaag

SEQ ID NO: 47327 - DNA, 283 bp, Glycine max
  Clone ID: 701038283H1
actcgagccgaatcggctcgagcccgcactctccaagtgcgggtactgatggggtcaaagtcgatgtcatccacttgctagacatggtgtgtgagaaatatggagggcgagtggatatggcgaaagcatattacaaagctctcactgcttccgtgagaaaacattttaagggcaacggcgtcattgccagcatggagcattgcaacgatttcatgttgctgggaactgaagcaatatcccttggtcgtgttggggatgatttctggtgcactgacccttatgg

SEQ ID NO: 47328 - DNA, 282 bp, Glycine max
  Clone ID: 701038284H1
ccgggtgctttaggggcagcgggtgctctaggggctacatattgtccaccctatctcactgttgatggtgcttatcatgcccgacaatcaggacaaacatctgcaacacctatttcaagcaaggaaaataatgtgaataaagctaataatgaatggaaatcaccacagaaatcagagcctgtaaatgatgagtttggacagaggcaaaataagccccgcagatactcggagatgaattttgggcaatgaagtattatagaatgcaacttgtttgaataaaaa

SEQ ID NO: 47329 - DNA, 283 bp, Glycine max
  Clone ID: 701038285H1
gcaaaaagaaagaatcccaggcgaggagaaagatggaggggaaggagcaggatgtgtcgttgggagcgaacaagttccccgagagacagccaattgggacggcggcgcagagccaagacgacggcaaggactaccaggagccggcgccggcgccgctggttgacccgacggagtttacgtcatggtcgttttacagagcagggatagcagagtttgtggccacttttctgtttctctacatcactgtcttaaccgttatgggagtcgccggggctaagtctaa

SEQ ID NO: 47330 - DNA, 282 bp, Glycine max
  Clone ID: 701038286H1
gtcctttttcctcattctcttcttcacaaaacatcactcttttttcatttcaccgacaacacaacaacgtgagttaaacaaaaaacagtaactccacgcagccatgacagacagggtgtacccatccgccaagcccgccgtggttaacggcggcgccgccaacccatctttcccggcgacgaaggctcaactttacggcgccacccgccccacctaccgccctcaaccccaccaccggcgccggagccggcgacggtgctgctgcaccttcttcttctggct

SEQ ID NO: 47331 - DNA, 282 bp, Glycine max
  Clone ID: 701038287H1
cgaaggaagatgagtttgagggcatcagagatagcgaagaagttgaatctgcaacctcacccagaaggtgggttttacgtggagacattccgagaccattccgtccagctttcgacctctcagctcccccccgaatacaaagtggatcgccctgtatcgacctccatctattttctcgttccttctgggagtgtgtctcgcctccatcgcataccctgcgccgaaacctggcatcattacatcggcgaccctctcaccgtagtggaattgaatgagaaagat

SEQ ID NO: 47332 - DNA, 269 bp, Glycine max
  Clone ID: 701038290H1
ctagaatggaatttcgatgctcagtcatctcttttaccattctcctctctcttgctcttgcaggagagagccatgtccatgcatcgctacctgaggaagattattgggaagctgtttggccaaacactcccattcccactgcactgcgagagcttctaaagcctctccctacaggtgttgaaatcgatgaactccctaagcaaattgatgatacacagtacccaaaaacattcttctataaagaagaccttcatccaggcaaaacaatg

SEQ ID NO: 47333 - DNA, 274 bp, Glycine max
  Clone ID: 701038291H1
caaaatcccattctggtatcagcctcaaactctttgaaggctaactcagagaggaagttctcagtatctgatgagtctagtccagagagatcaaaatgggtttatatattccagagagaatatgctaccgttgaccccgcccttgttgattttgttggcaccgatgaagcaacaacgtgtgttggccttgttattcggaaccaaaagaatggaatgacgtcagttgcccatatggattcaccaaaaattgtagaaatgggcctctcccaaatgt

SEQ ID NO: 47334 - DNA, 271 bp, Glycine max
  Clone ID: 701038292H1
cacttgtccatctatcccacaactaatttttgattttccttgtttatttatcttcttcctcccttgtttgtctgtctctttgtttctttggcttgacaagaagaagatgatgatgatgacaatggaggggatgatggacaagggggtgttggatgatgtgataagaaggcttctggaagggaaaggagggaaacaggtgcagctctctgagtccgagatccgtcaactctgcgtcaacgccagacaaatcttcctctctcagccaattctt

SEQ ID NO: 47335 - DNA, 246 bp, Glycine max
  Clone ID: 701038293H1
cttgaatgatttacaggcatagagatttgttagttaaacgcaaggaagttgagtttacttcggccattatgatctccagtttctaattttcttgccctacttagattttcattacttgagcatgtatttttcttgaaaaagaacagcggcttgttactgaagaacaatttgaattttttttccatgtataaccaaatagcattgtttactatttgatttgttaagtcaattgaattaaaaaataag

SEQ ID NO: 47336 - DNA, 273 bp, Glycine max
  unsure (1)..(273): unsure at all n locations
  Clone ID: 701038294H1
caaaaaccctaataacaatgggaggaaaatgtccgcacaggaacgtgaagaagagaagatattctcacaagaccgcgcggcgaaccaaatttgagctgaaaggggacgacatggtttatgcgcagatcaacaaacccgatcaagagagaccccctttacccgtcgacgaagatttgcctgggatgggccagtactattgccttcactgcgatcggtactttgccaatataactgtgagggatgagcactttaagaccanacgacacaagaagc

SEQ ID NO: 47337 - DNA, 274 bp, Glycine max
  Clone ID: 701038295H1
caacaaaggaacttgttatgccagttccagctttcaatgttataaatgggggaagtcatgctgggaataatctggctatgcaagactttatgatactaccagttggagccacttcatttgctgaggcattccgcatgggcagtgaagtttatcatgtattatagggaataatcaaggcaaaatatggacaagatgcatgtactgttggagatgaaggaggatttgctcccaatgttcaagatatcagggaggggcttgtcttactcatggatgc

SEQ ID NO: 47338 - DNA, 280 bp, Glycine max
  Clone ID: 701038296H1
ggacaacagttttcccagatagaacaaataataccatcacttgctcggctccgttaacaaaacaagaccaaaaggagaatggagtaccaatcttttggaagagtccagagaccaaaaggggctaacataatgcaggcattgaaggtgatcctggttttggctgttggtgcatggctgttatatcaggtcaagcactcgagaaacgatacagagaactatagcgctcaaaccgagtttgatggagctatattgttggggcgtaaagggatgccatcacggt

SEQ ID NO: 47339 - DNA, 138 bp, Glycine max
  Clone ID: 701038302H1
gctaacactcattaattgcaagaatggcacttcgttgcttggcgatgtcactttcagttctcttcactcttggtcttgcgagagcaagccatgccagagcacgaagatttttggcatgctagttgggcaaacactccc

SEQ ID NO: 47340 - DNA, 148 bp, Glycine max
  Clone ID: 701038303H1
ctcgagaatggccaatgtttcaattccactcccacgaaacggtttctccaaacccaattactcgacaaaacgcccatgtttaaccccttcagcttcaacactcagaatttcatgctctggagtggctgagtttgatggatctcatcag

SEQ ID NO: 47341 - DNA, 145 bp, Glycine max
  Clone ID: 701038309H1
ctacccttctcagttgcagagccatgtctcactccgacagcagcaagaagaagaagcagcagcagcgtacaagcacgaaggaggaggaggagaggaagaatcgaaagacgaaggcgggttgatgatcaagccgcagagcttcact

SEQ ID NO: 47342 - DNA, 147 bp, Glycine max
  Clone ID: 701038311H1
gcgttgtgcaagtacaaaggcaaaagaactgtcggcgatgcaatggctccttattcctctgttcctaagaagctattcaatgcacgttcaatcacccacctctagcagaaggtgatagctaccatgttgtggacatcacttccacaa

SEQ ID NO: 47343 - DNA, 144 bp, Glycine max
  Clone ID: 701038312H1
aaaaaaaagagaagaaaaaaaaacttggttttatcttctttgttattattatattcacttcttcaatatcttggttctttgatattattattcgattgagcaaaaaatgggagttccagagagagaccctcttgcacaattgag

SEQ ID NO: 47344 - DNA, 146 bp, Glycine max
  Clone ID: 701038314H1
cttctctctgtgtatttccctacctctcccttcaagatgcagatcttcgtcaagaccctcaccggcaagaccatcacccttgaggtggaaagctctgacaccatcgacaacgtcaaggccaagatccaggacaaggaaggaatccc

SEQ ID NO: 47345 - DNA, 276 bp, Glycine max
  Clone ID: 701038275H1
cagatacgaaattccaccgagtgcttcgaggtctacaagttagagcatcagcattgcacctaaaccctggctttctccgctttaatttctcgttctctcgccatcaagtccatatacatcgttccagcatggagaagataaaaataaaactactcatgaaggatgaaacatttctccaacacccttttgttcttgctgttgttctggttttaggccttgttatgatggacccttttcatctgggtccagtgtctgagcatgaattcagacccgtga

SEQ ID NO: 47346 - DNA, 285 bp, Glycine max
  Clone ID: 701038248H1
ggaaaatcctctgatactgttgttttcctgaaaccatcacaatttgtttctcaatcatgtcaacctcatcctcttcccaaagcctcaaaattggcatagttggattcggcaactttggccagtttctggccaagacaatgataaaacaaggccacactctcacagcaacttctcgatctgattactctgaactttgtctccaaatgggcatccattttttcagggatgtcagcgcattccttaccgcggacatagatctcatagtgttgtgcacatcgatattat

SEQ ID NO: 47347 - DNA, 291 bp, Glycine max
  Clone ID: 701038249H1
ctctctcttttcttcccattttgccccttcctcctttccttgcttccgatcagggccaaccacatatgctaaacaaggaaactaaattctaacctccttcagatctacaccacccttctctttttttccagtttcataaattctacaccatgggcacggcggttctacggccacaagattgtttcacccaccgcatcgctgttccaccggcggggttttcccggagaagaacctctgggacacacaacaacaattacttcaggggcacgcggaagccggttacccgacccg

SEQ ID NO: 47348 - DNA, 278 bp, Glycine max
  unsure (1)..(278): unsure at all n locations
  Clone ID: 701038250H1
ctcgagcgttcggtgagagttagagagagagagagagagagagaaggctcttttttgtctgntgtgttggtttctcttgttttttttttgtaggtactgaggaagaaagaccaaaactttatccgcttgcttcacttagctcaagagcgtacaattcaggcaaaggccttgaagtcggagtgtgtgttaaggatttcttaggagttgcttctgtcttgactgaagaaatggaggtatatggcaaatctatggttgcaggtcctgcaaatgttattttt

SEQ ID NO: 47349 - DNA, 287 bp, Glycine max
  Clone ID: 701038252H1
gcaaagatgtttcctttcgggcaaaagggtcaaaagataaaggggactatggtggttatgcagaagaatgtgttggatatcaacagcatcaccagtgttggagggatcgttgaccaaggcttaggcttcataggcagtgcagtcgatgcacttacttttgcagccaccaaaatctccatccagttgattagtgctaccaaggctgatggtgggaaaggaaaaattggaaagagtacaaatttaagaggaaagataacattaccaaccttgggagctggcgaacaagc

SEQ ID NO: 47350 - DNA, 284 bp, Glycine max
  unsure (1)..(284): unsure at all n locations
  Clone ID: 701038253H1
ccgngttcaaagtcttggtctatcccaacgtggactacgcattcatagtgacactacttatgattattgatgacatcaaagattatgatgtgttggtaaatgcgacggtgagtggtgtcctaactgtggcgacggggggtatcttacctattctgacattgtttgagggagaaaatttagaagaagaaaccttagatggagaaaacttagaagccgaatacttacaagaaggagaaaacaactcaggtggagaaaacttagatggagaaaacaacccagaagga

SEQ ID NO: 47351 - DNA, 284 bp, Glycine max
  Clone ID: 701038254H1
atagttattccttgcttcacttgtatgctttagtttctagcatcgatcactcctaattacttgctgcatttctctactccttgtgcttgacacttttgtcatttaaaatggaacttaattttaagtaccaacttagccttttctgtgtcacactgctcttacctgccctgtgtacctctcaagactcttttacgtgctccagagcaacctattatggtagcccagattgttatggaaatccaaggggagcttgtggctttggagaatatggacaaacggtaaac

SEQ ID NO: 47352 - DNA, 283 bp, Glycine max
  Clone ID: 701038257H1
attgaatcttcttcatcactgccaaaaacgtcaaaccaaaattttaaaacataaatctccaaccccattttctcacacacactctctttttctcttccaattacaacacaatctgtctgagattcgccaccgaaaaacctctcaccatggtttctcgccatttggtttcgctcttcctctgtttcctctgtttcgagatctctgtttcatcaattcgattgcccggtttggaccaagacgccaaggccacgcatggatcggtgcttaggttgaacagaggagg

SEQ ID NO: 47353 - DNA, 281 bp, Glycine max
  Clone ID: 701038258H1
cgaaggcttcgaatctctctgaaacttttctcttctctttgattcttctctaccagtgaatctcacggcaagcaatccagcaggtgtatgatgccaagcttaacaagtgaacccaaaaatgttgaaatctttggtgtctatgaaatcatagtgagctcggtttagtggtgttgatcaagcccctcatttgctcaccaagacatcggatttgttgtgtgctaccttaaacttttggtggccaattctacatctggaagctagaagagtgtcccttccctcga

SEQ ID NO: 47354 - DNA, 277 bp, Glycine max
  Clone ID: 701038259H1
ctgctcgtgcctctagggttatcatatctccatttccatttcctctctctcagtttccaagaatcttaagctatgggaaagtcttacccaaccgtgagcgctgattaccagaaggccgttgagaaggcgaagaagaagctcagaggcttcatcgctgagaagagatgcgctcctctaatgctccgtttggcatggcactctgctggaacttacgacgtgagctcgaagaccggtggtcccttcggaaccataaagcacccctccgaactcgctcacg

SEQ ID NO: 47355 - DNA, 277 bp, Glycine max
  Clone ID: 701038260H1
atccagtatggggttgggatcttacatgctacccagaatgagtcaaaaatcctgaagaagtctcttaaggatgttgtaacagaaaacgagtttgaaaagaggcttttggctgatgttattccacctaatgacattggtgttactttcgatgatattggagctcttgaaaatgtcaaggatacattgaaggaattggttatgcttcctttacaaaggccagagctattttgcaaagggcaattaaccaagccgtgcaagggtatcctattatttggtc

SEQ ID NO: 47356 - DNA, 274 bp, Glycine max
  Clone ID: 701038261H1
ccaactctggcttcaacatctgctggtcgtgagaactggggagagaccaacttggctgatgctagccctaggactgatacttcaacagatgatacagaagacaaaaatcaaaggcctgaaaggggtgaatccagtggatcaaaagataaatcagatcaaaagacattaagacggcttgctcaaaatcgtgaggctgccaggaaaagccgactgaggaaaaaggcatatgtgcaacaattagagagcagtaggttgaaactgacccaacttgagc

SEQ ID NO: 47357 - DNA, 273 bp, Glycine max
  Clone ID: 701038262H1
cgcatcgcagcctgttccagcattcgggctttccgctggagtcggagttggcaacgctttggtgttggagatcgtgatgaccttcggtttggtgtacacagtctacgccactgccgttgaccccaagaagggcaatttgggaattattgctcccatcgccattggtttcattgttggcgctaacattttgttgggtggggccttctccggagcagccatgaaccctgctgtgacatttgggcctgctgtcgtgagctggacctggaccaacca

SEQ ID NO: 47358 - DNA, 279 bp, Glycine max
  Clone ID: 701038263H1
ctgctttaagtttgtggctttctactttctctttctagagtagcgctaaactcatacactgatcatgggagtggatttaagacaagtggtggcgggtgtcctcaccctcacaatgttcgtcatgcttatacacatgatcaaaagagaccattttgatgctgttgatgataaacttcctggaacggaggatgtcagctttgaaagtacaaactttgatactactcatgttagacagaacatcgggatttggaagggagatggtgatgagttaaaaccatg

SEQ ID NO: 47359 - DNA, 273 bp, Glycine max
  Clone ID: 701038264H1
ctctcatccacacgaatcacactccccacagtgcgattcattcaccaatggatcgcaacggcgttctctctctcgcattcatctgcattgtagtcgccggcgtcggaggccagtctcccgccgcagcgccgtcaaacactccggccaatcccgccgccgccactcccgcccaagcaccttccacagtaccgaaatcaccagctcccgttgcttctcccaaatcatctccaccagctgcaacccctgcatctactccggcggcatctcccacca

SEQ ID NO: 47360 - DNA, 285 bp, Glycine max
  Clone ID: 701038266H1
atctgcttcccctagcaaccttcttcttacttctctccgcttcttatctccagattgctggggcggaagcacaaccgttgactagtctcaaacttaactctcatattcttcaggagtctactgctaaagagattaatgaaaatcccgaggcaggatgggaggctgctataaatcctcgtttctccaattatacagttgaacaatttaagcgccttcttggagtcaaaccaatgcctaagaagggacttagaagtacacctgctatatctcacccaaagacgttga

SEQ ID NO: 47361 - DNA, 280 bp, Glycine max
  Clone ID: 701038267H1
cgcatagggacatggtcctctcggagtacctcccgcgcgtgatggaggaagccgaggtggcgcgtgaccggaggaagacgctgaagctcttcacgccggcggacatgaggatggtgggaaggagagggtgcgacatgtggcagggcgtgaatccggaccatcccgccaagttcgagacgctggcgatggatttggagatgaaggagatgataataaaggatttggatacgtttcttgagaggaagtttttgtataagaatgttggaaaggcttggaagag

SEQ ID NO: 47362 - DNA, 283 bp, Glycine max
  Clone ID: 701038268H1
cgcaaagaaatggaagggttgtcgtcttcatcggcgatcgcgcagaaaacatgggaactcgagaacaacatcatcccgatggacactccgggcggcgccgctacctcctccaccgctaccaccacgaccaacgccgacgactcgatcttctactacgacgaggcggggcagaacgagttccagcgcgacaagccctgggccaacgacccccactacttcaagcgcgtgaagatctccgcactcgcgctcctcaagatggtcgtccacgcgcgctccggcggca

SEQ ID NO: 47363 - DNA, 285 bp, Glycine max
  Clone ID: 701038269H1
ccaccccaaaaacaaagtgagattataggaaacaaaaatttctttgcttaatactagttcctcctttctcctagcctggtagtcttttgaaaattctttatcttgatcacataattttcattttgaacttgaagaaagttttagtgtatttttttttccttaaagaaacagaacatatcctgttctttctttctctgtttgcatttttgttcacttctttctttctttctttctttcttattatctagttaagcatgacaacatttatggacatgtacaacacta

SEQ ID NO: 47364 - DNA, 283 bp, Glycine max
  Clone ID: 701038270H1
gctttctgtccaagctcatgttcctcagttgaagccacccccatgcaatatcaacgatttaggagaacagtgctcagaagcaaagggcatgaaggccatgatattcttcgtagccctgtacttggtggcattaggtagtggttgtgtcaagccaaacatggttgcttacggaggcgaccaattcgaccaagacaaccccaagcaattaaagaagctctctacctacttcaacgctgcatattttgcattctctttgggagaacttgtgagcctgaccattctt

SEQ ID NO: 47365 - DNA, 274 bp, Glycine max
  Clone ID: 701038271H1
ctatgagtcgtcatcccgaggttaagtgggctcagagacttgacaaggtctatatcacggtgcaattggctgattcaaaaaatgccaaggtggatcttacaccagatggtatttttaccttctctggtagtgctggtgctgaagaccatcagtatgagctaaaactggagctctttgacaaggttaatgtagaggagagcaaaattactgtaggagtgcgaacatattctgtgtagtgcagaacgcagaggatggatggtggaaaaggttactg

SEQ ID NO: 47366 - DNA, 284 bp, Glycine max
  Clone ID: 701038272H1
gaagagaagaggacttgtattttctgccagtttcccagtatggtggccacaagcacaaatcaatccgagttagaaacaagtaagaaggattccacttatgacagaatagctgaagtcaaagcctttgatgaaacaaaacttggtgtgaaaggcctcttcgattctgggatcacaaagataccacgcatgttccatcatgccaaggtagaggaccacactgaaaccatgccaaatgactcaaacttcagtgtccccatcatagatctccaagatatagacacaaa

SEQ ID NO: 47367 - DNA, 278 bp, Glycine max
  Clone ID: 701038274H1
ctttcgcttctgaatcttcaacaatggtgctcgaggcgacgatgctctgtatcgacaattctgaatggatgcgtaacggtgattactctccttctcgatttcaagctcaagcagacgctgtgaatctcatttgcggtgctaaaacgcagtctaatccagaaaatacagtgggagttctcacaatggcagggaaaggcgttcgtgttttggtcacccctaccagtgatctgggcaagatcttagcctgcatgcatgggctagatataggtggtgagatg

SEQ ID NO: 47368 - DNA, 294 bp, Glycine max
  Clone ID: 701038218H1
ccaaacttcaacttgtaatcaagggagagagaaaatttcaagcacaaaaaatggcggagaagaaagtggtgatcctaggaggtggtgttgccggtgccaaccttgcaaaaactatacaacatcaagccaacgtcacccttattgatccgaaggaatattttgagattccatgggcaagtttgacgggattggttgagccaacttttgctgaaaggatagtaatcaaccatagagagtacttcaaaaagggtaaccttgttgtatccagtgctgtcaacataactgaaactgcag

SEQ ID NO: 47369 - DNA, 289 bp, Glycine max
  Clone ID: 701038219H1
ccgcttctaaaacgccttactctgtatcttctttcatcatccaaaaaaaaccattcacacaaagaaaacctctgggtttcccaagatgtcatcatcggaactctcttctttctttctcctgcccctatcagccatactcagtttcgatgctttgctcggagttatgtttctagtggccgtgttcggctactggctggttcccggtggtcttgcttgggctttgtccaaattcaagcctgcgattcccgggccttgcggttacccggtggtgggcctggtttgggctttc

SEQ ID NO: 47370 - DNA, 286 bp, Glycine max
  Clone ID: 701038220H1
tcgttgttcaagtaaatggccttcgtcaccactgctgaagtgtgtgatgcgaacccccagttaattttgagtggggagcatcgtgcccttcagccagtttttcagatttacggtcgtcgacaggtcttctctggacctatagttaccttgaaggtgtttgaagacaatgttttggttcgcgagttccttgaagagaaaggcaatggaagagtgcttgttgttgatggaggcgcgagtttacgctgtgctatattgggtggcaacctgtggtacaagctcaaaacaa

SEQ ID NO: 47371 - DNA, 283 bp, Glycine max
  Clone ID: 701038222H1
ctttgaaggaattggttatgcttcctttacagaggcccgagctattttgcaaagggcaattaaccaagccgtgcaagggtatcctattatttggtccccctggaacaggtaagacaatgcttgcaaaggcagttgctaccgaagctggtgcaaatttcatcaacatttccatgtcaagtatcacatctaagtggtttggtgagggtgaaaagtatgtcaaagctgttttttccctggctagtaaaattgctcctagcgtgatatttgttgacgaagtgatagc

SEQ ID NO: 47372 - DNA, 286 bp, Glycine max
  Clone ID: 701038223H1
cttgtgtttgcgtgtctctccgtaaattgccttcgactgtgacaacacgcaccgatcgccatgaacatcttcaccaagaaacccaccgccaaagaggctcttcgtgagagtaaacgtgaaatgacaaacgccagtagaggtatagagaaggaaattggagctctacaatcggaagaaaaaaagcttgttgctgagataaagagaactgctaagacgggaaatgaggcagcaactaaaattctagctcgccagttgatcaggcttaggcaacaaattgctaatcttc

SEQ ID NO: 47373 - DNA, 283 bp, Glycine max
  Clone ID: 701038225H1
tcttcaacttcacccattcatacgtgctgttgttactgctgctcttttctcttttcttttctctttagttctctcttcccctttctttttctttttcttcttcttctgagcttgtttaagcttttcttccattaacatattatcaccatgtgtggtattcttgctgttcttggttgttctgatgactctcgagccaaaagggtccgcgtgcttgagctctctcgcagattgaagcaccgtggccctgactggagtgggctccatcaacatggtgactgctttt

SEQ ID NO: 47374 - DNA, 282 bp, Glycine max
  Clone ID: 701038226H1
cctcctcgactacttcgacaacacaaagctccaccagatcaccaacgggaccactctttccaccactctctaccaaaccacaggtaatgccaacggcaacgtcggctccgtcaacatcaccgacctcaaaggcggcaaggtcggcttcggctccgcggctcccggctccaaactcgactcctcctacatcaaatccgtcaaaagtatcccctacaacatctccgtcatcgaaatcagcgcgccgataatggcgccggggatcctcgcggctcctcctccgtc

SEQ ID NO: 47375 - DNA, 282 bp, Glycine max
  Clone ID: 701038227H1
cataaaccctacttctacttcccccctttgctctcaaaccttatcacctaatccttatcctcccaaaccagaaaaccatgtctacctccgcagcttccctcgcactcccaaccctcactctccgaacccgacaacctctatgttctccccaatgcttctcctcgtccctctccctcacacccaacaacaaacccatttccatttctgctgtttttctcaaaccaacaactctgtcgtcgtctcgcttcgttccccacgtcgtggtgtcgtcggatttggggc

SEQ ID NO: 47376 - DNA, 280 bp, Glycine max
  Clone ID: 701038228H1
cctcgtttgggcgaagtgaaatttgagcagtttttgccaaccgaggcaaatccgggggtggaagagaggagcaagcggtggttgatgagaagctctgaaattccaccaacttggggtggacgctaaccgttacctttgggaagaaactgcttctatgccaaactgcgtttgcagttaacgaagctcctctcagcaaccctttgctagtcatcttcagcacgaagagagcgtcgtcgtcttcgctatgtcgcgacagagatccagaagagccgaactacct

SEQ ID NO: 47377 - DNA, 281 bp, Glycine max
  Clone ID: 701038229H1
agacaactcccaacttctctcagtactctcatcaggatccgtgtgagcagtcgagcagagagatgatcatcaacgtgaaggaatcgacggtggtgcggccggcggaggaggtggcgcggcgggtggtgtggaactccaacgtggacctggtggtccccaatttccacacgcccagtgtatacttctataggtccaacggcacctccaactttttcgacggcaaggttctgaaggaggcactgagcaaggtgctggtgccgttctacccaatggctgggcgg

SEQ ID NO: 47378 - DNA, 253 bp, Glycine max
  Clone ID: 701038231H1
cgcaacatcttagaaagaatcccacgcgaggagcaagatggaggggaaggagcaggatgtgtcgttgggagcgaacaagttccccgtgagacagccaattgggacagcggcgcagtgccaagacgacggcaaggactaccaggagccagcgccggcgccgctggttgacccgacggagtttcaggcatggtcagtttacagagctcggatagcagagcttgtggccactcatctgtatctctacatcactgtc

SEQ ID NO: 47379 - DNA, 272 bp, Glycine max
  Clone ID: 701038232H1
aattaataacaagctagctattagttcgattttgtagtaagtgaggtgccaatatggtgaagatagctcttggtactttggatgactcttttagcgctgcctctcttaaggcttatttcgcagagttccacgcaactctgatttacgtgttcgctggtgttggatcagccatcgcttacaacgagcttacaaaagatgcagccttggatccaacggggctggtggcagtagctgtggcacatgcatttgcactgtttgtaggtgtcatcgtc

SEQ ID NO: 47380 - DNA, 294 bp, Glycine max
  Clone ID: 701038233H1
cacctggccaccttctagaaaccacgccaggcccaccaaaaaacctgaaccggttccggacccggtcgaaccggaggagaagttcgcggccgagtccatgataacaaccgcggaagaattggggtggctgggggagatggaagcgacgtcgtccacggttctcgaaagcccgcttatggctacgacgtcccatgctgacgtggcgctgattccgatgagggaggaggacgagtcgctcttcgccgacctcggagagctgccggagtgctcggtagtgttccggcaggggctgct

SEQ ID NO: 47381 - DNA, 291 bp, Glycine max
  Clone ID: 701038234H1
cgagcttgataagcaataagcaactactccctcgtatctcacagttgttgaaaagcaaggtacatgagttgggtgaaggggttcgtggggcacagatgggtggtgtttgtgtgcgcgatgtgggacatgtcgtttgcggggacatcttacatgttcgggagcatatcgccggtgataaagagcagcatgggtttcaaccagaagcaggtggcgttcttgagcgtggctaaggatttgggtgacaacgttggtcttcttgctggaaaaatcagccaggcttcccctgtttgg

SEQ ID NO: 47382 - DNA, 289 bp, Glycine max
  Clone ID: 701038235H1
caggagcattgaggaccaaggtggacagcgatggcgcgaatgtcatggttgcattatacgaaaacggtttggtcaccgattgtccaagaggggagaacaaagggcgtgtcctatccaacgactatgttgttagaaagctcgaaaagctctgcactgtcaaagacatctctgccaagaaaacagtatcaggaatggttaactttcccttatgggaaggattcaaaagcagcaaatgtggtttggctgtctttgttcagagcaaatctcaccagatttttggttcacagag

SEQ ID NO: 47383 - DNA, 288 bp, Glycine max
  Clone ID: 701038236H1
ctatttttagtcatcacggtttctgcccacaatatggtataggagtgttgatcgacaaatctctcataaagattgattgccttggtaacgtgacattgcatgacttgattgaagacatgggtaaagaaattgtccgaagggaatcaccagaagagcctgaaaatcgcagtaggttatggtgtcctgaagatatagttcaagtcttagaagaaaataagggtactagtagaattcaaatgatagctctggattatctcaattatgaagaagtagaatgggatggaatgg

SEQ ID NO: 47384 - DNA, 279 bp, Glycine max
  Clone ID: 701038237H1
catttggggtgtgtgagtgcgtgtgtgtggttggttgtatgtatgtatgtttgttcatcaacaatgaagatatctgatgagaacagttctaaaccaatcaaccccacaagttttcaaggagggatagaatgtgtggggaacagaaagatggggcagaacagaagggctttgagcgtgatcaatcaggatctggtggcggaagggagaccttacccttgtgttgttaacaaaagggcattggcagacaaacacgatgtatgtgagaagaagcaggcggat

SEQ ID NO: 47385 - DNA, 289 bp, Glycine max
  Clone ID: 701038238H1
ggaacagactgcatattagtcataggatatccttggtatgaaggccagcagactgagtcaagtgaacctgattctaggagtgaatctgattcagataaacagaatcactccagtcattcttcgaaggatgatctgaagaggaaaaagcacagaagaaagtcatccggaacagttgtgattcgtaacatcaactacatcactccaaaaaggagaaatggaaatgaggatggaggctctgatgaatctttagaagatgatgatgtcatcgatgacgaaaccatcaaacaaa

SEQ ID NO: 47386 - DNA, 289 bp, Glycine max
  Clone ID: 701038239H1
ctttctttgtctcggtcagactttctcacagagaaaacaggaaagccagaaccttcttaccccttcacctcttctctcttttcctatttctttctctcacgtttcgctccatcatccctcacacctcaccccaccctacccccatcccacccaccttcttctttctctctttcttcccttttccctttagttttcgtctgttcttcccttgtgggttctcttgtctctctctgatctcatgaagaagatgaaaggggttgtccccatggaacctccttatgaggtgtac

SEQ ID NO: 47387 - DNA, 281 bp, Glycine max
  Clone ID: 701038242H1
cttcaactctgcttcccctggcaaccttcttcttagttctctccgcttcttatctccagattgctggggcgaaagcacaaccgttgactagtctcaagcttaactctccgatccttcaggagtctattgctaaagagatcaatgaaaatcctgaggcaggatgggaggctgctataaatcctcatttctccaattatacagttgaacaatttaagcgccttcttggagtcaaaccaacgcctaagaaggaactgagaagtacacctgctatatctcaccca

SEQ ID NO: 47388 - DNA, 281 bp, Glycine max
  Clone ID: 701038243H1
aagaaagaagaatggaggaggaaggtgacatatacgacggtgttcgagctcagttccctctctcattcgggaagcaatcgaagcctcaaacccctcttgaagccatccacaatgcgacacgtcgttccaattccaatcccaaaacagccaacgaccttccttctgtctcctcctcttccagggattggctcaattccctccgccctcccaaaacccctactcctcctcctccgctgccgccgccagatcacgacgacggcccaatggtgggaccgccgccg

SEQ ID NO: 47389 - DNA, 277 bp, Glycine max
  Clone ID: 701038245H1
cttcgctctctctgcttcactttctcgcttttgcattttcttgtgaaaaaaaaaatcctcagaacaaaaataggtcttcttcttctctgatctaccaaagcttcaaattctccttagtttggtttgtctgtgagtttggagtgtaatgtcgccgccgacgctggtaacggaggaggaggggcggacaccgtggcgtccgattcttcgcaatccttggactgtttctctcagaatggtgctggattgaaagaacggaattacttagggttgtctgatt

SEQ ID NO: 47390 - DNA, 308 bp, Glycine max
  Clone ID: 701038217H1
ttcgggtcgagcatttttcagtttctcagtttcttattcgttagatctcatcttacactcgccgtcaagttcgtctcgcgccaccgtcgacgcagctccgaccacctcctttggttccctcactttctcgctcttcttcttctcagaaatatgccttctcagaaggttgaaacgggtcatcaagacacggtccatgatgtcgcgatggattactatggtaagaggctggccacggcttcatcagatcacacaattaagataattggggtcagcaacacggcctcccagcatctagcaactttgactgg

SEQ ID NO: 47391 - DNA, 261 bp, Glycine max
  Clone ID: 701038184H1
ctagctgctaattatgtagcatcaactttagttctttgtccttgggggtcgataattgttgctaatacaactgctggttttgaagacgtcatcaaatgggcttctagtatcatcgccctacagctgtttagttttcttggggaagaattcgggctgctgtatgacaatgagaggacaagaatgtttttctgttatctaaaatgtattcttgttctgtcaaaattgtgagtttccaagttgctttgtgaaacctccaataac

SEQ ID NO: 47392 - DNA, 282 bp, Glycine max
  Clone ID: 701038185H1
gtacgaaattgtgtcaatccttattggtctcatgtgtttttcttggtgttaaggaaattcatctcctcgtagtaacgaatggagagtagggagagggagaggtgaacctcgtccttgccccaacgaggtttggaccgaagcacgtgcgggatggcaggccacgaagaagaagaagaagaagaaggcgcgtggggcttggagagaggccagaggtagagcgcgtggagacgacggaagcctccgagggcgaggaccacggatcgtagctgttgctcaccgcac

SEQ ID NO: 47393 - DNA, 283 bp, Glycine max
  Clone ID: 701038186H1
caaagaaaactcaagctcccagattctgttccaatgcctcccgtacctatttcccccatcaaagttgggcatattgatgatgtccaagagctaagaaaaaccaagccaaggacaattcctcaaagatttgtacgagacatgacagaaagaccaacagtcactacacctcttcccccaccatatagtgacatgccagtcattgatttctataagcttagcaaagggaacaaagaggaagtcctcactgaacttttcaatcttgcaactgcttgtgaagagtggg

SEQ ID NO: 47394 - DNA, 277 bp, Glycine max
  Clone ID: 701038187H1
tctcgagccgattcggctcgagggaggagcttgaggagaaagtgagactcattgaattccatcactgctgatattagtagtaacatgtcgtatgtggtggctgagaatgctacacttagacagcaagtcggtgctgctggtgtcatgtgtcctcctcctccagcacctgctcctgggatgtaccctcatcatcctccaatggcacctatgccttatccgtggatgccttgtgctccttatgttgttaagcctcaagggtctcaggttcctttggttc

SEQ ID NO: 47395 - DNA, 283 bp, Glycine max
  Clone ID: 701038188H1
ccattactcacttttcatccttcgatcatacacttagttgcttccaattaagatggttctgctagagaagctctgggatgatgttgtggctggccctcaacctgagcgtggccttggcaagctcagaaaactcaccaccctcaaaactattgatgaaggagaaagtagcaagctgcagaagacgttgtcgatgccgtcgacaccaacaaccccgatgactccgacgactccaacgacaccgggatcggcccgtaaagctgacaacgtttggaggagcgtcttc

SEQ ID NO: 47396 - DNA, 280 bp, Glycine max
  unsure (1)..(280): unsure at all n locations
  Clone ID: 701038190H1
ccgctattatatccaactctagaacctccgccaccgccaccgccgccgccaccggcactaccacaatccatgtccaagaaaccaagttttgcgagagttttcgctaaacaaagctcttcagtcatgaacaacaatcaatctgctgccaagaagtatgctttgattcgtgataacttctctacccttgaacaggtgactacagccctgaggaaagaaggattagaatcatcanatctcatccttggaattgattttacaaagagcaatgaatggactgaat

SEQ ID NO: 47397 - DNA, 281 bp, Glycine max
  Clone ID: 701038191H1
cgcaacaaaaagaaagaatcccaggcgaggagaaagatggaggggaaggagcaggatgtgtcgttgggagcgaacaagttccccgagagacagccaattgggacggcggcgcagagccaagacgacggcaaggactaccaggagccggcgccggcgccgctggttgacccgacggagtttacgtcatggtcgttttacagagcagggatagcagagtttgtggccacttttctgtttctctacatcactgtcttaaccgttatgggagtcgccggggctaa

SEQ ID NO: 47398 - DNA, 279 bp, Glycine max
  Clone ID: 701038192H1
cttttccttctctctggctttcctttgacgcttctgacactgctcactttctttctctccgtgtcctaatggctctccccgactcttcttcctgccgcaactccctgatcccctccttcatctactcctcttcctccaaaacgctccctctacaccacatgctcaactccgcctccgccgccgccccctcccagccgccggaaaacctccacgccggatcgcgcggcctcatgattccctctcccagcgagtcacgcaagatcgagatgtactcccctg

SEQ ID NO: 47399 - DNA, 284 bp, Glycine max
  Clone ID: 701038193H1
gcaagtaataccagttacaaattacagggtatacaagcaacataaaactcacgttagatattgaagtactactagtcaaaaggttcagtatcgattagttacccctagacagaaaatccgtaacttgttgagccagcaatgcaggttcacgttggtaagatatcataatgcagaggcacattgcaggaagagttttgagcatcaaacgaggagcatcttgagaagactccatggagctactacttttctctacacccttccttttttgttttaggcagtttttt

SEQ ID NO: 47400 - DNA, 276 bp, Glycine max
  Clone ID: 701038195H1
ccctcgagccgaatcggctcgagcaacattagtgctgagttctttgaactgcaacctaaggaaggccttgcccttgtgaatggcaccgctgttggttctggcttggcttcaattggcctttttgaagccaacatcattgctgtcttgtctgaggttatttcagcaatttttgctgaagtgatgcaagggaagccagagttcactgaccatttgactcataaactaaagcaccaccctggacagattgaagctgctgctatcatggaacacattttg

SEQ ID NO: 47401 - DNA, 300 bp, Glycine max
  Clone ID: 701038201H1
cggcgggtagggtttcgacgtgcttcttcttcgtgtttgctctttctctccttcttccttttcagatatccgctgaggaatcatcggagaaagagttcgtactcacattggatcactctaactttcacgacactgtcagcaagcacgatttcatcgtcgtcgagttctacgctccatggtgtgcccactgtaagaagcttgctcccgagtatgagaaagctgcttctatcttgagtagtcatgatcctccggttgttttggctaaaattgatgccaatgaggagaagaacaaagaccttg

SEQ ID NO: 47402 - DNA, 297 bp, Glycine max
  unsure (1)..(297): unsure at all n locations
  Clone ID: 701038202H1
cggaatggcttccctaccctttccgttgatgaacaagtcgttgccatagagctgccactgnaatacggtcccttcattgagtcagtgaacaagagagggctgaacctctctgaggtggtgtgttccacattcacaatggggcggtttggagaaaccaaggacagaaggacagtgagagtggaatgcttcatgaaagaaagcagccccaatatctgggtgaggcctatcagtggactcacaatggtggttgaccttgaactcatgaagatcgttcagtatcacgacggtggcattata

SEQ ID NO: 47403 - DNA, 293 bp, Glycine max
  Clone ID: 701038204H1
cttaaatcagcggcccggatgcatttatacttacaccgaatcacgaggcgacaacatcgacatggagggtctcatcaacggcttcatcaaacttgctctcggagctgatggtggcgatcgggaagaacaacaacacgggagacacgaccgtagtagaagctcctgggctgaagtcgtctcccaggatcaacaagtaccattccaactcccatgtcttttaatatttgcttcatcacccaatctcatttcttcattcttcatttttgcacgatcaccctcttcctcatcaccaa

SEQ ID NO: 47404 - DNA, 293 bp, Glycine max
  Clone ID: 701038205H1
ctgttgttccttcgttcgttccctccactaagcaaaacccaaaagacattcattttcgtttcgtttgtatagagcatggccggtggttctatcaagagacattgtttctccgaagaggacgatgtggagcctgggtattctgggcacaaccacttccatcattaccaacacggttttatttctaggacattgggttatggcactttctacaaccgacgtgtgaggagccattcgattttctcgccgagatctgggagattttatgatgccagattcgaagaccaccaacccca

SEQ ID NO: 47405 - DNA, 290 bp, Glycine max
  Clone ID: 701038208H1
tctgcatagtaatcattactttggaaatgattccggcattattgaaaatgaagctgtttctaagtcaaatgtggtcaagtttgaagtgcagctttacaaaactcgtgaggagaaatatctgcttgatcttcaaagggtccagggcccacagtttcttttcttggatctgtgcgctgctttcctttcacagctacgtgttctctagtgaagctcacaagtcgcaaaggagaccttgaggtgtcttgtgtggcatgtgaataagcttacgttgtacatatcaatgccctttc

SEQ ID NO: 47406 - DNA, 286 bp, Glycine max
  Clone ID: 701038210H1
cgggttacaagcttgactggggagtcaagggaatctggttaggaatgatatcagggactatcctccaaacatgtgttcttttggtgctgatttacaaaactaattggaacgaagaggcctcccttgccgaagataggatacggacttggggtggacataaaaaagcgactgtgaatgacacagaaaacacacaagaaacatgaaattgcagtaggagaattggtacgatatgaagtatgatacttgaattgttgacagaaaagctttagttgctttagaatattct

SEQ ID NO: 47407 - DNA, 287 bp, Glycine max
  Clone ID: 701038211H1
ctcacccttgaggtggaaagctctgacaccatcgacaacgtcaaggccaagatccaggacaaggaaggaattcccccggatcagcaacgtctcatcttcgccggaaagcagctcgaggacggccgtaccctcgccgactacaacatccagaaggagtcaacccttcaccttgtccttcgtctccgtggtggcatgcagatcttcgtcaagactctcactggcaaaaccataaccctagaggtcgaaagctctgacaccattgacaacgtcaaggccaagatccagga

SEQ ID NO: 47408 - DNA, 283 bp, Glycine max
  Clone ID: 701038212H1
cattttcttcgtagccaaacactctgaaattctcagttatgtcgtggcaagcgtatgtggatgatcacctactgtgtgaaatcgaaggtaaccacctcactcacgccgctatcatcggccaagacggaagcgtttgggctcagagcaccaacttccctcagttcaaacctgaggaaataactgccatcaataatgactttaatgagcctggatcacttgctccaactggattgtatatcggtggcaccaaatacatggtcatccagggtgaagctggtgctgt

SEQ ID NO: 47409 - DNA, 284 bp, Glycine max
  Clone ID: 701038213H1
acctctcgcccagaatccgagatcaaccccgacgaaggcaaggggtttttctcggcttcttcacatttctgaaatggcgcctgtttcagctttagccaagtacaagctcgtcttcctgggtgaacacatccgtgggcaaaaccagcatcatcactcgcttcatgtatgataaattcgataccacctatcaggctacaattggtattgattttctatcaaaaactatgtatcttgaagatcgaactgttcgactgcagttgtgggatacagctgggcaggaaaga

SEQ ID NO: 47410 - DNA, 286 bp, Glycine max
  unsure (1)..(286): unsure at all n locations
  Clone ID: 701038214H1
ctcgagccgcgaaaaagagattggagagagagagaagtgagactgtgagagggagcacagtgaagaagagaacgaaggaacgaagatggagactcctcctccgcaacaaggcgtggtgaagaagaaggagacaaggggccgaaaacccaagccgaaagacgaacacgccaaggcgttgaaggaagggagaaaaacacagcaacaacaacatgatcagcagcaacaacaacaacagcaacatcaaccttcggtggacgagaaatacacgcatganagtcccttgttc

SEQ ID NO: 47411 - DNA, 284 bp, Glycine max
  Clone ID: 701038215H1
ctgagccgcactgttctttctttgtatattgttcttgttcttcattcacaccccattctctctctcaaacgttcaaaccctgaaacctttctatctttttcttttgattattatttggtgagactgagacgtgtttgtactttctcggagcttttgattactttaacattttggtttgctggtaatattccttgttcgtcttcagttgttacacttttggcccctttttaggtttcggtgattttccggagacccaggttggaattcgcaagatctaaggtttt

SEQ ID NO: 47412 - DNA, 289 bp, Glycine max
  Clone ID: 701038216H1
ctaacactcattaattgcaagaatggcacttcgttgcttggcgatgtccctttctgttctcttcactcttggtcttgcgagagaaagccatgccagagacgaagatttttggcatgctgtttggccaaacactcccattccaagttcattgcgagatcttctaaagcctggccctgcaagtgttgaaatcgatgaccaccctatgcaaattgaagaaacacagtacccgaaaaccttcttctataaagaagaccttcatccaggcaaaacaatgaaagtacaattcagc

SEQ ID NO: 47413 - DNA, 283 bp, Glycine max
  Clone ID: 701038183H1
ccctctctctctctctctctttctctctcatccagatcttgcaaaaaaaaaaaacacaatggcagcgagcgctcccattccacgcgaagagttcgtgtacatggcgaagctggcggagcaggccgagcgctacgaggagatggtggagttcatggagaaggtctccgcctccgccgagagctaggagctgaccgtggaggagcgaaacctcctctccgtcgcctacaagaccgtaatcggcgctcgccgcgcctcctggcgcatcatctcctccattgagcag

SEQ ID NO: 47414 - DNA, 289 bp, Glycine max
  Clone ID: 701038155H1
catatttttcccatctatttttttttctcaaaactcacatattagtattttctcgcacaaaatttcagctcactattcttatttttctgtttcatccaatcctgctcatttatttttaatgacaaaatatacgcaaatggtgcaaagttgaagattttccacatcttgtttcatgcccagctcctcaagctagcttttgattttgatttttctcattttctggcttaaatttctcatctttttctataaaaaaaataaaattcccagcagcatagtagtagaagttttt

SEQ ID NO: 47415 - DNA, 288 bp, Glycine max
  Clone ID: 701038156H1
tgtttccctgagttaacagctacatttgcaaaacgatgttcctgtcaaatttgcctatatattcagaaatcacgagcctggctgctctagaacacaaagatttggtttttattctacctaacaccacatggatacgttgccggaggattgtgtttccaaaattctgtcttacacatctccaccagacgcatgtagattctctatggtctcttcaaccctacgctcttccgctgactctgaccttctctggcgaactttctttccttctgattactctgacattgtctc

SEQ ID NO: 47416 - DNA, 218 bp, Glycine max
  unsure (1)..(218): unsure at all n locations
  Clone ID: 701038157H1
gttcactagacgaacacatgagagattgcgcctagtcagacatgtaaattgccatgtagttcagcaaattattacttggttgagattttcattgatggtttgagtgccttagtggacgaccccttaagaaagggttctncatgtatacatgtaatgataatatgggatctattgattttgagatatttganatgttagtctatccttaacttgataac

SEQ ID NO: 47417 - DNA, 284 bp, Glycine max
  Clone ID: 701038158H1
caacttgaattttcttgcaattgtggaagggatttcttttttgcagatgatggccattattattgttgtttaaaaaatttcatgcacattgttttaagcagtgttgttaaatagccgcaatagtggcgctatagtgctattgcattgcgaaattccctggatccgcgattgcaactctggtccactattgtggctgctataggtgttgtggttgcagcatgcgtgctgcatcctcttgttatctctgtcaagtctcctgccaattggacttttgagttaatatt

SEQ ID NO: 47418 - DNA, 288 bp, Glycine max
  Clone ID: 701038159H1
caaatggcaggataggaagactgcttcttggtttctaatttcacaggacacagtcatcctagaagattcaacaagattacatcactgagagactctgcctggtttactatttctcaagccaaaaattcacgtgaagcaaataacaggcgaatcatgtcattagttaggcttgctgatctagctcctacatcatatgaaaatgctaagctcttctcactgaaggggtgtgatgttagaccaggcctgtcctcccaaatttttgatcctgataagcataggagcatgtac

SEQ ID NO: 47419 - DNA, 289 bp, Glycine max
  Clone ID: 701038160H1
cttcatttcactgtgagcaaacaagatcttcagatccatgacaacaacgacaatgcttctgcgaactcgtccacgccgattctcaattctcgcatccctcacccgaaggattcgcctcacgaacccgaaatccttcaccggagcccgcgcacgcgctcgctcacgctctccgcgtcgtcgagttcgctctcgccggtcgaagcttcgccgagcagaatgacgcgggcgctgtcggagacggatctctccgcgcgctccaaaacgtcttcgttcggctcctctctgtttt

SEQ ID NO: 47420 - DNA, 286 bp, Glycine max
  Clone ID: 701038161H1
cgtacttactcacagatatatatttttcttttgtctccatcattttctcgagagctttcagtttgtgtggttcatctttcttcttctccttccctcccccctctgtaacaccccgcttctctgaatccctttctgttaatcatctgtctttcaagctaagattttcgggtttgtctattaattcaccaagaagcaaacttagaaggatttttcgaaagccaggtgttttcagaaacgagatccaggttttattgtcgaatttcgctagtcaaattaattttcataa

SEQ ID NO: 47421 - DNA, 289 bp, Glycine max
  Clone ID: 701038162H1
ggcttccattgcaggatgtctacaagattggtggtattggtactgtgccagtgggacgtgtagagactggggttgtgaagcctggtatggtggtgacttttggtcccactgggctgacaactgaggttaagtctgttgagatgcaccatgaggctctcacagaggctcttccaggtgacaatgttggatttaatgtgaagaatgttgcagtcaaggatctcaagcgtggttttgttgcatccaactccaaggacgactctgccaaggaagctgccaacttcacatccca

SEQ ID NO: 47422 - DNA, 290 bp, Glycine max
  Clone ID: 701038163H1
gagactctcgaacagcgtgaagctggtacaacaacggctgttgtttctgagcaaacaaaagcaattgcagctaaaatatcaaattgggacaatgtcgttttggcctacgagccagtttgggccattggaacacgaaaggttgctactcctgctcaggctcaagaggtccatgctgatttgaggaaatgggttcatgacaatgtgagtgctgaagttgctgcatctgtaagaattatctatggaggttctgtaaatggaggaaactgcaaagaattggccgcacagcccga

SEQ ID NO: 47423 - DNA, 296 bp, Glycine max
  unsure (1)..(296): unsure at all n locations
  Clone ID: 701038164H1
cctcgagacgctcgagccgctcgagcggctcgangggaaaattaaaccgtgcataacttttcctcaaatgcaccatatgattcctttcatgactccgacgggtgatattccgccactttacatgctttatgctgttgttgtgcacctggacacactaaatgcgtctttctctggacactatgtttcatatgtgaaagatctgcaaggcaattggttcagaatagatgatattgaggttcagccagtactagttaatcaggtcatgtcagaaggagcatatatcttattctacatga

SEQ ID NO: 47424 - DNA, 285 bp, Glycine max
  Clone ID: 701038166H1
cgcttagccacatggagcatcatcacctaagacttattctcctactcttgttcctgttcctacccaacacctgcttctctttctcatttcaaactccttcaagcaatgaattctcgaatcaaagttcttcctctctgaagcagcagattctggagctagctaatagtcccagcacggtgaaatggatgaagagaataaggagggaaatccacgagcacccagaacttgcatatgaagagttcagaacaagtgctgtcataaggcgtgagcttgacttgttgggtg

SEQ ID NO: 47425 - DNA, 288 bp, Glycine max
  Clone ID: 701038168H1
ccttattcattcaccaccctatccaacatggctgaggagactccaaaccagacaaccacaccaccccctcctcaagagtcagtggtgcaagtggaggaagtggtggtaaccgatgttccacagcccgacaaaacaacaactacagttccagttgaaagagattcgcaacctcaaccttatgagccagagaagaagaagcccgttgaggaaaccgtcactctcgagactcacctctccaaacccaacaatgctgaccacaccaacaacatccctgaattcattgaagaa

SEQ ID NO: 47426 - DNA, 285 bp, Glycine max
  Clone ID: 701038171H1
cagaaagcagagaattggtgagtaagatagccgctacagaagagaaacaagaagcaaatggcttctttccatctcagaagattagtaagcagcgttcttaactcgcgggtgcaaacaaatccccttttgaccttcaggtgcttctgttctcctcctgttacacctttcacttcccatgctagttacgaccctaactccatccacttgtccaaccaagaaagcaaaagacgcttgttcaacaggctattatacagaagcaagcagcgagggttcctcgaactcgat

SEQ ID NO: 47427 - DNA, 281 bp, Glycine max
  Clone ID: 701038172H1
accagttactatactctctctttctgaaacaatttgcccaattgtttgagatgttcaatatgagatttgtatctcaagattgggcggtttcatgtgcactaatacttctggtgtcatgcacaacatactcattagcttctttggggaaacctgagaacaacatataaacatctgtttttaaatcacccaagattgagctaggtccagggttagtttcaaacaaattttattttgatgttgactttccaagaggccatattgcactcaagagtttcaatgct

SEQ ID NO: 47428 - DNA, 284 bp, Glycine max
  Clone ID: 701038173H1
gcggctgtctttgttgaagcattcaaaagtgcgaggtgcgtattgtctaggggtttttctcaaatggcaatgatccaactactcttttaggaggcattgttgttcgtaacactcttgtaatgtatgatcgtgagcattcaaaaattggtttctggaaaactaattgttctgagttatgggaaagactacatgtctcaaatgccccaccacccttgatgcctcctaaatctgaaggaacaaatttaaccaaagcatttaagccctctgttgctccatctccatca

SEQ ID NO: 47429 - DNA, 281 bp, Glycine max
  Clone ID: 701038175H1
cgagaaccggccatccggagagcaatgccttgttgaatgggcaaagccttacctttctaacaaacgcagagtttttcgcgtgatggatagtcgtcttgaaggccagtattcccttacacaagctcaaagggcagccacccttgcttttcaatgtcttgctgtagagcccaaatacaggccaaatatggatgaggtggtgagagcattggagcagctacgcgaatcaaataatgatcaggtgaaaaatggtgatcataaaaagcgtagtagagttagtggat

SEQ ID NO: 47430 - DNA, 278 bp, Glycine max
  Clone ID: 701038176H1
ggattggattgggtttgcagcagaagcagcgaaggatatggcgattcttccttctcttgcagttccttcaactcccatttctcgggtaaagctgtttcaatgccaaccctgtcaattccatagatgcacagaactatatcttcctcatcaaacatattatactcgaactacatcaattaaagtatcaatggcagaccaaaatgagccgagtgaggttaatatgcagattgggatcatgagggagaaacttaaagaaacactgccagtctcagttcaag

SEQ ID NO: 47431 - DNA, 283 bp, Glycine max
  Clone ID: 701038177H1
ccggtctcctagtcccatacttttcatggaaatacagccatcgccgtcaccactccaacactggttctcttgagcgggatgaagtatttgtgccaaagcagaagtcctgtatcaagtggtactctaaataccttaacaatcctccaggcagagtcctcactcttgctgtcaccctcacacttggttggcccttgtacttggctttaaatgtttctggaaggccttatgatagatttgcttgccactatgacccatatggtcccatttactctgatcgtgaacg

SEQ ID NO: 47432 - DNA, 281 bp, Glycine max
  Clone ID: 701038178H1
ctgaagcgcgatggaaacgggattgaggatctgagcggtggcgttcatcaactcccctgctgatggtcccgcctccgtttcccactatttcaaacccaaacatatagctctcgtcgacgacgagggtttacctttacaagaggtgcattttagaggctactccaaggaacaacactccctcttcctcacggttactctggttttgtcgtgtgtaagaaaagttcgcctcctacctccgacgaaaactctcactcttgggacatgatagcagaccaaagaca

SEQ ID NO: 47433 - DNA, 287 bp, Glycine max
  Clone ID: 701038179H1
agttgtagacgcagacgcagcagatcagatcctctgtcttcaattcaagttcaaggtatggctcaacaacagggggacgaaatggagtatgctgctgatgataatgaaatggcggaagtagaagatgacatgtatttcagtggtagagtgtttggtgattcagagtccgaatcagacgacgatgatgaatatgactccatggaaaatcggatgacagatacctctgctgcagaagctaggaaaggaaaggatatccaaggtattccttgggatagacttagcattag

SEQ ID NO: 47434 - DNA, 284 bp, Glycine max
  Clone ID: 701038181H1
cggataggtcaaacatcatcatgtcggacgaagagcaccatttcgagtccaaggcagacgccggtgcctccaaaacctaccctcagcaagccggtaccattcgcaagaacggctacatcgtcatcaaaggacgcccctgcaaggttgtggaagtttcgacttccaaaactggaaagcacggtcacgccaagtgccactttgttggaattgatattttcactgccaagaaacttgaggatattgtgccctcttctcacaactgtgatgttcctcatgtgaatcgt

SEQ ID NO: 47435 - DNA, 282 bp, Glycine max
  Clone ID: 701038182H1
caataagcaaaagccaattgatacgtgcatatcacaaaaactactcttacacaccaaaaaaatcctctatcaccaaactcacctataccctcaaactcaaggccctatagtccaagcaagtgagtgagtgttacaacttacacagcatggaatatagtcaatatactacttattcagcagaaggtgttgaggcagaaacttacacaagtagctgcaccaccccatcaagatccaagacgggaaccaccaacaacacaagaaggttcagtgatgaccaaatca

SEQ ID NO: 47436 - DNA, 285 bp, Glycine max
  Clone ID: 701038154H1
gaaacttcaccgtttgactctcgcgagatgctcgcatccttcgtctcgtccacgcccctgctgtcggactcatggcgcctctgaacccaggccaacgccactcccttcctgaccttcgtgactgagcgtgtcggcgcctccgtgtatgtggctttctccggcgtccatatggccggcgagtccgacccgaactggagaaatttgactcctttgtacagcatcggcggcctgcctctgttttcgtctcggcggagcaaggaatgggaggacacggtcatggttcat

SEQ ID NO: 47437 - DNA, 294 bp, Glycine max
  Clone ID: 701038130H1
cttccgtggcagtggtagttgccaaactagtagcaagaagtaagtcacgtttttctccgttttcattcatcacaatattaaagcctttagtttccttcagtatgggggacacttacgttttggccacaccgaagcgcaaccgttccgatgacgtggacggcggcgaggcgaagaagctgctgttgcagcagggcgaggcagacccggcggcggcgctggcgagcgcgcggcacgagttcggggagcacggcggggtgaacatgtcgatcgaggcgtcggcgacgttcacggtga

SEQ ID NO: 47438 - DNA, 287 bp, Glycine max
  Clone ID: 701038131H1
cactcttcttctcttgcggctagggttttagcgcacttcttctagatttaaggaagatgggtaaggcaaaggttcacatcagtattgtggtcattggccatgtcgactctgggaaatccactaccactggtcacctgatttacaagcttggaggcattgacaagcgtgttattgagaggtttgagaaggaagctgctgagatgaacaagaggtctttcaagtatgcctgggtgctggacaaacttaaggctgagcgtgaaagaggaatcaccattgatattgctttg

SEQ ID NO: 47439 - DNA, 238 bp, Glycine max
  Clone ID: 701038132H1
cagaaaacgtagaaaaataagcaggagagttaaatgtgtaataatcaacttggaggtaatgattctcagttagttacctgtgtgtgtccttatgcctttctgtttatgcatgcttatggatattaagatattttcatgtggtatagattctactctttttttttattagtgtggtataaactctcttgtgtcgcaaagtttttctccctcgtgatggaatatatggattttgatagcc

SEQ ID NO: 47440 - DNA, 296 bp, Glycine max
  Clone ID: 701038133H1
caggaatctctggaacagacaagtgggttgcatgggctatcaatcccagcaacaacctcaattcagctatgacgggagcacaagctctggtggctatcataccatctagcggtgccccaaatgcatatacttcttccatccaaaatcccggacccacactggcagagggagccatctcttataatcctctcaggattgacggctacccatcagagcactgaggtcaccatctatgctaccctcactcttcccagtggtaccacactttggtccacctttggaacgatggtctgtgt

SEQ ID NO: 47441 - DNA, 293 bp, Glycine max
  Clone ID: 701038134H1
gagacaccccatgaaagataaaaaaaaaagttgcaaagatgatcatatctgagacaaagactggaccctctcttgtgccaacttacaacatagattagatattactttgacaagaaaacctagatctttctcccctctatgaccttctcaatatagacttgtatttatagaggtttcagcttcagggaagatgataatggtctaaaaagaaaaaaagctttgcatggcgagccacagaataggagaacttggtttgtctgagtcaagaccttcaactcaccacatcccttatg

SEQ ID NO: 47442 - DNA, 289 bp, Glycine max
  Clone ID: 701038135H1
ccgagttgttgccggaagggtttttggagaggaccaaggagaagggaatggtggtgagggactgggccccacaggcggcgatactgagtcatgactcggtgggagggttcgtgactcactgcgggtggaactcggtgttggaggcggtttgtgaagctgtgccaatggtggcgtggcctctctacgcggagcagaagatgaataaggtgatcttggtggaggaaatgaaggtgggtttggcggtgaagcaaaacaaagacggcttagtgagttctaccgagttgaggga

SEQ ID NO: 47443 - DNA, 292 bp, Glycine max
  Clone ID: 701038136H1
cggctcgagcggctcgagtggacatgagaagatagacggaagtgagagacgaggcactgagcatccaacaatggccttgttctctgctaccgcaaccgttcttcctcggaacctcgcattcgcttcctccaccaaactctccctctctcacagtcactctcttctacatcacttcctttcattccccactcccaaatcatcaaaccctcgcaaccgggtcgcaatctctctccaaaccccacgcgctcaatccggcgcgtccgcctccgcctccttccatggcctctgctac

SEQ ID NO: 47444 - DNA, 289 bp, Glycine max
  Clone ID: 701038137H1
taccacctcacctcttgtccagaaatctccattctccaaaactgcttcaactcttctcattctctctatctctctctctgcctcacactggagtaccctcttcaatttccatcaattaagtttctctaataccctctgaatcatcatcatcatcatcatcattagtcatggctcttgtgatatattttgtgctttttcttgccctcactggccattcaagtgctctttactgtgtatgcaaagatggtgtgggtgatcaagctcttcagaaagcaatacgctatgcatg

SEQ ID NO: 47445 - DNA, 290 bp, Glycine max
  Clone ID: 701038138H1
ccactcagtagtcaacactaggcactctctattcccattcattgcagaagaagatggaggctcacccctacgtcccacgcgatttgcacttacccggctacgctccctgcttcctttccatgtccaacattctctccgtcttcgcctcctcctcattgctcatcgtcactctcgtctggatcttctctggacgctttaagaaaaccaaagttgatagagtgctgatgtgctggtgggccttcacaggtctcacacacattattcttgagggttattttgttttctctcct

SEQ ID NO: 47446 - DNA, 265 bp, Glycine max
  Clone ID: 701038139H1
gagaaacatggcttccttaagctccttagtgctgctccttgcagctctaattctatcccctcaagttcttgcacactatgagaatcccccagtgtacaagcctcccactgagaaaccaccagtttataagcacccagttgagaagcctccagtttacaagaccccagttgaaaagcccccaatttataagcctccagttgagaagccaccagtgtacaagccaccagttgaggacgcccccgtgtacaagccaccagttgagaaa

SEQ ID NO: 47447 - DNA, 175 bp, Glycine max
  Clone ID: 701038140H1
ctttctctctatccatatgctatgcatatgcttattctctctctctctctctcactattgatctgattactcgttgtgtactataaccaaattggtgcaaccccttttgcatctgatcctagaatcacaagcctagctacccgttttctaccttctcatgacgtgtaattggttg

SEQ ID NO: 47448 - DNA, 278 bp, Glycine max
  Clone ID: 701038142H1
gtctccatgccgatcaatatttatggtgtggggcaattctgagtctcgagtgttttagttgtgaactctgttgcgtgattaaaacaagtctgagaagaaaaacaaattagtccaaccttttgtttgtttctggaagttagttatatcaagttgtgtttttgcattaaggggtttttgtcaatgatatgctaattttaatagatgtagatttatgtcaatgatattgtatgttaattttattcagtctcgtatctagctgaataattaagaattatact

SEQ ID NO: 47449 - DNA, 291 bp, Glycine max
  Clone ID: 701038144H1
gggagagctcattcactcatcactgccaatgacaaaacaaagttctaggttggagggtaaggtggctcttatcactggagcagcaagtgggattggtgaagagacagtgagattgttcgctgaacatggagcacttattgttgcaacagatattcaagatgaacaaggtcaccgagttgctgcttcaatagggtcagagagagtgacttaccatcattgtgatgtgagagatgaaaaccaagttgaagaaacaatcaatttcactttggaaaaacatggtcgcatagatgt

SEQ ID NO: 47450 - DNA, 293 bp, Glycine max
  Clone ID: 701038145H1
gtcaacaacagctaaaaaaatctaaggtggtgaaaattgactcaagaaaatcatgggaacaccacataactaatgcaaccaataaaggctaccctgttatggttcatttctctgcttattggtgcatgccttcaatagctatgaatcatttctttcaacaactggcctccacctatcaaaatgttctctttctgaatgttgatgttgatgaggtcaaggaagttgcttccaagttggaaattaaagcaattcctaccttttgtttgcatgaatggaggagctccagtggataa

SEQ ID NO: 47451 - DNA, 275 bp, Glycine max
  Clone ID: 701038146H1
ggctcgagacaagatcgatgaagactcttcacgttctcctagtttcacgctttgctttccaggcgtacttgcttggttctagtcctacagaagctacacgtttgcggacactgtcactgggctattcttcaagtactggagcaactctgaagaaagtgagtttaaggccaccaacacatccacgacgacactcgcctccaccaccaactcctggctattctcctgaacccggtccaggacgaactcgaagatctcctccgactccaagacctttc

SEQ ID NO: 47452 - DNA, 292 bp, Glycine max
  Clone ID: 701038147H1
tgttcctttatttataccctttcttctaaatacatgtttcttctttctttcttttttatttgattttactctctctctgaattctcttttgttttctagtgctggtgtgtaatttgaaggagaatttttaaagtgggttggggttggttttagaattctgtgactaacgcgtcctgggtcaccgtgcccctcccttggattccgctggtagtgttttttgtgcaggaaaacagataaagtcggtggctttattggaatatggtgaaacttgtcactaacctttattgttctt

SEQ ID NO: 47453 - DNA, 299 bp, Glycine max
  Clone ID: 701038148H1
ctcttatatcttaaaaaatacgtaattattattaggagccaggcgtacacttgaagtatgaataaaaagacacaccaaagataccattgttaaaagtttgggcagccctaggcacaaaagaaagtggtgattgatggctactcctccggtgaattcgttgccaatagcataccaagcatggacaagcctgggagtcccagattggttgaacaaaggagacaacgcatggccaatggtgtcagccaccttggttgggattcaaagcatgccgggcctcgtcatcctctacggaagcatcg

SEQ ID NO: 47454 - DNA, 281 bp, Glycine max
  Clone ID: 701038149H1
tctcgatccgctcgagccggagctctggagttactcttctttatggtgatgtaaatgatcatgacagccacgttaaggcaatcaagcaagttgatgttgtaatatctacactaggtggacagcagatagatgatcaagtgaaggtcatagcagcaataaaagaagctggaaacatcaagaggttcctcccatccgaatttggattagatgtggatcatcacaatgcagttgagccagcagcaagctttttcaacaaaaaagtgaaaatcagaagggcaatt

SEQ ID NO: 47455 - DNA, 285 bp, Glycine max
  Clone ID: 701038150H1
cacacctcatcggaatattcctttcttttcggtttcaatctctggatccgtcgtgacagacggcatggccacttccaatggcttcgtcgacggcactccctcggaatctgcattgatctttctcggcaccggttgttcgagcatggttcccaacctcatgtgcctccttcagccttctgaccctccctgccccgtctgcgtccagtcattgtccatccctcccgaacgaaaccctaattacaggtgcaatacgtctctcctaattgactacggcgccgccgccgc

SEQ ID NO: 47456 - DNA, 300 bp, Glycine max
  Clone ID: 701038151H1
tatatatatagggcattcaagtgagagtgaagtaaaagggttgaaaattttgaatatgaagatcagtattttgctatgtgtggtgcttttgggtttccttggggtttgtcaaggaggcagcctaaggaaaaagttctaccgggattcctgccctcaagccgaggacattattaagaccaaaacccagcagcatgtgtctgctaatcccgatttgccagccaagttgcttagaatgcattttcatgattgttttgtcaggggttgtgatgcctcagttttgttgaactctactgccagtaa

SEQ ID NO: 47457 - DNA, 289 bp, Glycine max
  Clone ID: 701038152H1
cctactggaatttcttcaacacatggtctcagatctttcaatctcaagctcaaggccatgaatacaatgttcccatttcacacccacccattctcaaccgttggtttcccagtgattgtgatccgtctgttaatcttcctttcaaacatcatgacgagctcatttgcaactttgaagcaccttttctgagggagagagtcttccacttttctgcagagtccatagcaaaactgaaagcaaaagccaactcagagtccaataccacaaaaatctcttcattccagtcatt

SEQ ID NO: 47458 - DNA, 288 bp, Glycine max
  Clone ID: 701038153H1
gagaaaccatatagaatcaattctaataatggttttgccgacttaaatttaccatgtaagcttcaaaaagagacaggtgtgcagtctgatgattttggggcctcaatccctcacagaaaccatacatttcatgatatgcccgggagaatgacaccaggctctcataattttcccaatgatgtcatcctgaatttgaaaagaaaacaggatcatgaagcttacccagatctcccactatcaaatcacgggcagaaacatggatggctgccctcgggcacttgtgctggg

SEQ ID NO: 47459 - DNA, 295 bp, Glycine max
  Clone ID: 701038129H1
cgcgaccggagctccgctctgccgcgtccgagctcgcctctgttctgaaccagttttgttttgttcctttgcggcttgtttctctgactgtgcgagctattgttccgaaaagcaatggcaagtgcattgagtagcagagttgaatctgttcgaaactccccctttctaagattttcgctcaacttcatcagagcccttagctcttcttcgtcttcttggtctgccgtttcttctgctgagaaccttaagaaatcaaagcgaaggaagacgaagaatttgttcgaggtggctcagt

SEQ ID NO: 47460 - DNA, 291 bp, Glycine max
  Clone ID: 701038107H1
cattggtgtgcctgagcccttgtctgtgtttgttgacacttatggcactgggaagatccctgacaaggaaatcctcagcattgtgaaggagagttttgacttcaggcctggcatgatctccatcaaccttgatctcaagaggggtggaaatggcaggttcttgaagactgctgcatatggacactttggcagagatgaccctgacttcacatgggaagtggtgaagccactcaagggggagaaggtactgcttaactaaaggggttccaacactcttggccaaggactttt

SEQ ID NO: 47461 - DNA, 291 bp, Glycine max
  Clone ID: 701038108H1
cacgtggtctttctccaagtcagtgagcctcattctcattcttgctacttcagaaactcgcttcccttttccaaagcgaagacgccactccgtttaatgactacttaatatgtcatatatgccataacgtatgtacagtatgcataaacatggttgtaatgcatggcgtgatattgtgtttattttcctgtcactagtcttttgagtatgttcctgacatgctgtgttcagtactattgttactctgctgaactattccaacattgggaactgatctgtttctaagtcatc

SEQ ID NO: 47462 - DNA, 290 bp, Glycine max
  Clone ID: 701038109H1
cgcaaactaaaggtgaagtttgccagaaacaagatgggaaggaaccattttcagcagcaacactgtgctgatgggagcatgtggatggagagtcagggtcagcaacagagctatgccttccaagaagagtcttggagccctgataacaactatggccacaaccacaagcaattcccaggcatgcacatgaacatgaacaacaacaacaacaacaaaaggcttggtgattttgccgctgtgagatcagacttctcaatgccaaaacatcatcatgggcatggcaacggcgt

SEQ ID NO: 47463 - DNA, 295 bp, Glycine max
  Clone ID: 701038110H1
cttcattaaacaatggccgtaaagcaagtgagatttttcaaggtcaagctctcttgtacaaacatttgcttggcttcatagattctaagtgtctaaaatggatggttgagcttgacatacccgacataatccacagccatagccatggccaacccattactttttcagagttggtgtcaattctacaagtcccaccaactaaaactcgtcaggtgcagagcctcatgcgttatctagcacacaatggattctttgagatagtaagaatccatgacaacatagaagcatatgctct

SEQ ID NO: 47464 - DNA, 253 bp, Glycine max
  Clone ID: 701038111H1
agcaattccaaggcttagatgggtgatgagatcaccattgaagatgttgacaaagctcaagaatgcttatatgaactttatgttgagactgtcaaggaacgtaggtgctatcaacagtgataacatctttgaagtgaaacggcattccaaaggctcgtcaagtgtataagggttattccagtgatgaatttgaggctaggctcatttttgagatttctaagacattggttgcttcctatgaaattcatcccat

SEQ ID NO: 47465 - DNA, 295 bp, Glycine max
  Clone ID: 701038112H1
cgcgtcagagagagagaagatgaagagcgaaagcccattggttggattctgcattgaggcagcatgtgagaccagagaaagcgtggataaatggcggatgcagagccgcagtctcgatcgcttgccttctcatctcgccgactctctcctccgccgcctcatcgcccgccgccatctttacccctctctcctcgaggttttcaaacatagtgctgaagaggttgatgtgagacgggacaactccgtggacgcagaatggatggcgtatttgggagcatatcgtcacttgcgctac

SEQ ID NO: 47466 - DNA, 294 bp, Glycine max
  Clone ID: 701038113H1
cttttagcgcagcttcttctagatttaaggaagatgggtaaggcaaaggttcacatcagtattgtggtcattggccatgtcgactctgggaaatccactaccactggtcacctgatttacaagcttggaggcattgacaagcgtgttattgagaggtttgagaaggaagctgctgagatgaacaagaggtctttcaagtatgcctgggtgctggacaaacttaaggctgagcgtgaaagaggaatcaccattgatattgctttgtggaagtttgacacaacaaagtattattgc

SEQ ID NO: 47467 - DNA, 286 bp, Glycine max
  unsure (1)..(286): unsure at all n locations
  Clone ID: 701038114H1
gctctcctgcggcaccgccgattgccgctccgggaaagtagagtgcgtcggcggagcaaaccgccggcgacattggcggagttcactctcaacgcgcgcgacggtttggacttctacgacgtgagtccggtcgacggttacaaccttccgatgctgatcgtcgccaaggcaggcatcaggggacggtgnagcgccaccggttgcctccgtcgactcacaggcgggtgtccagcggagctgacggtggcgcgatcacacggcagccgcggcgacctcgcgtgccgga

SEQ ID NO: 47468 - DNA, 299 bp, Glycine max
  Clone ID: 701038115H1
ctagaatctattattgcatcggaactttctgatccagcttggccagcagcactattgaatgatgtactactcactttgcatgctcgttttaaggcttctccagatatggctgttactcttcttcaaattgcaagaatatttgctaccaaagttcccggaaaggttgatgctgatgtgttgcaactgctctggaagacttgtcttgttggagctggtcctgatggaaaacataaagctttagaagcagtcacaattgtacttgatctaccacctccgcagcctgggtcaatgcttggtct

SEQ ID NO: 47469 - DNA, 301 bp, Glycine max
  Clone ID: 701038116H1
ctcgagcgctttgaagatgtacttgatatttatgagggaagtattaagcttccaagtggacctttagcgagtaaactcagagaacttgttccctatgagctgctgagagaacttattaggaatgatggtgagagattcctcaaattcccggtgcctgatgtgatcaaagtgagtaagactgcatggaggacagatgaggaatttgcaagggaaatgcttgcaggggttaaccctgttattatccgccgtcttcaggaatttcccccggccagcaagctagattcaagagtctatggagacc

SEQ ID NO: 47470 - DNA, 279 bp, Glycine max
  Clone ID: 701038120H1
caaccagttatttcaaaatttagttacaatcattgggtcttattctctaacattgatgtcttcattttttctatttttttggacatgcaggcctccagtcagttttctttgtccattgtttgtttctgttcgggtaatgaagagtgattcccggtccagcaaccagcgatgtctcgctttttgggttttgtattccttgtgtatgatcatggaaggggaactttcagtgctatttaactgcctcccatggtggcctcatgtgaaatccatagcaactat

SEQ ID NO: 47471 - DNA, 273 bp, Glycine max
  Clone ID: 701038121H1
gtggtttcagtgagtgatcggtgttcacttgatccttcataagtcgtcatcatcatcatcatcatcaccgttgattgaagaagatgccgatcagaaacatcgccatcggaaggcctgaagaggctactcaccccgacacgttgaaggcggggttggctgagttcatctccaccttgatcttcgtgttcgccggttcaggttccggcatcgcctacaacaagctcaccgacaacggcgccgccactcccgccggcctcatctccgcttccatcg

SEQ ID NO: 47472 - DNA, 290 bp, Glycine max
  Clone ID: 701038123H1
cgacaccagaggaacaacccaaggcagaggagaaaaaaccagaggaagagaagaagaaagaagaagcagcagcagcggaaaaaccaagcgaagagaaaaaaccggaacaagagtcgaaagaggaagttgctgctccgccaccgccaccgccaccggccgagattgtgctcaaagtgttcatgcattgcgagggttgcgctcgcaaggctcgtcgctccctcaaaggattcccaggggcgtacgatgttgtcaccgattgcaaatctcacaaggtggtcgttaagggagag

SEQ ID NO: 47473 - DNA, 293 bp, Glycine max
  Clone ID: 701038124H1
attttgggatccctggtgctgttaccgtggttaacggctttgacaatgagttcttcttggacagcataaccatggcacaaaatgttcattttgcttgcaaatcttgggttcaaccatacaagcttgacccagagaagagaattttcttcgttaacaaggtgtatctaccctgtgaaacaccaattggggtgaaagaactaagagaaaaggaactgaaacagctaaggggtgatggatggggacttagggtatcttctgatagaatctatgactatgatgtatacaatgatttg

SEQ ID NO: 47474 - DNA, 291 bp, Glycine max
  Clone ID: 701038125H1
atcgcagtttcaccaccgcgtcatgtccgaaccagaagccgcttcggtgatgtggcaactcatgcaagccgtggcgcactgccaccgcctcggcgtcgcgcaccgagacgtgaaacccgataacattctcttcgatgaggagaatcggctcaaattagccgatttcggctcggctgacacttttaaggagggcgagccgatgagcggggtggctgggcagccgcattacgtggcgccggaagtcctcgccggaagggattacaacgagaaggtcgacgtgtggagcgccgg

SEQ ID NO: 47475 - DNA, 292 bp, Glycine max
  Clone ID: 701038126H1
ctggctttaggtgttcctgctcttccgttgacatacgtggctcacgttctggcagttgttgccagcgtcttggtcgtggtctgggtcgtcaatttcaggggtggcttggcttgggattctgataacaagtccctcatcttcaacattcatccagttcttattgttattggcttactagttcatgggggtgaagctattataagttacaaagcttttcccctaaagaaggaagtgaagaaattgatacaccttgttttccatgccatcgcattaatacttggaatagttggaa

SEQ ID NO: 47476 - DNA, 290 bp, Glycine max
  Clone ID: 701038127H1
catatcatgggttcagaaaattgtatagataagacgcactttgtgctggtgcatggggcatgccatggagcatggtgttggtataagctcaagccacgcttggcatctgctggccacaaggtcacagtgcttgaccttgcagcttctggagccaacatgaagaaaattgaagatgttgacactttttcacagtatactgagcctttgttgtttctattggacacaattccctcaaatgaaaaggtagttctagttggtcacagctttggagggctgaacatagcacttgc

SEQ ID NO: 47477 - DNA, 295 bp, Glycine max
  Clone ID: 701038128H1
cgcatcacaacacttggttgtttgttaccatcttccaaaaatatcatgctcctaacgtaaaaatcctcggtttcaacgttcaactgcgatctctaaacaaaaccatggcatcactctcaggcatttgctcctcttccccaactctcaaaaaattcccgaaccaatccccatcgttgaccgaccctctccgcaaagaccacgtgtccttccccgcccgccgcgccgatcggactctcagcctcgcgccccctcctcgtgcggtggctcgtgaggtttccgacggagcattggcggc

SEQ ID NO: 47478 - DNA, 305 bp, Glycine max
  Clone ID: 701038101H1
agaaaacaacaccatttgatccaacagacacactccctctctctcttgatcattctctctcagtgctctcgatctccatctgcaacttccttgtctgacagatcctgtgttccggagaaaggaaaggaaaggaaagatgtcggggcaaacgcagcgtctgaacgtggtccccaccgtgacgatgctgggagtggtgaaggcccgattggtcggcgccacgcgctgccacgcgctcctgaagaagaagagcgacgcgctcacggtgcagttccgccagatcctgaagcagatcgtctccacaaaag

SEQ ID NO: 47479 - DNA, 270 bp, Glycine max
  Clone ID: 701038068H1
ccctcttcattgccaatggaaggaagggcgtgatatatggtggcaggatgtcattcctcaatatccaactacttgtccgttggagtgggctgatgcagaggatccactttttctactctatacaagtgggagcacagaaaacctaagggtgtcctccatacaactggtggttacatggtgtacactgcaacaacatttaagtatgcatttgactacaagccgtctgacatctactggtgtacagctgattgtggttggattactgggcac

SEQ ID NO: 47480 - DNA, 270 bp, Glycine max
  Clone ID: 701038069H1
ctcgaccgaatcggctcaggtgtgattgagtttggctgtcacaatctctctctcatacgaaaatgtcactcatctagcaaactccgccttctacaactctctcttctgcatctcccattcacagaacaataacaaatacaccacattctccttctcgcttcgtcctccaacaactcttcacttcaatccccacaggtccctccctctaattcgcgcttccaattcttctatcaatgctgcttcgaccactgaactggacgctgtgtccgc

SEQ ID NO: 47481 - DNA, 274 bp, Glycine max
  Clone ID: 701038071H1
cggctcgagcggctcgagtgtgagcaaagaaagatagtgagtgaagtaactgaagagaagaaaaaatgccgtgcctcaacctcagcaccaacgtgtccctcgaaggcgtcgacacctcttccatcctcgccgaagccactcctccgtcgccagcataatcggcaaacccgaagcctatgtgatgattgtactgaaaggatcagtacccatagcttttggtgggaatgagcagccagcagcttatggagaattggtttccattggtggtcttaac

SEQ ID NO: 47482 - DNA, 273 bp, Glycine max
  Clone ID: 701038072H1
gcgaagactagatctgatctgagagaatggctcctcggtctagcagcaaggacgcccaagaccttttccgcgctctttggtctgcttatgctgcaacccccactaatctcaagatcattgatctctatgtcatctatgcgtattcaccgctttcatccaggttgtttacatggctttggttggatcatttccatttaactccttcctatcaggagtactttcttgtgtaggaactgctgttcttgctgtttgtctcaggatccaagtgaataa

SEQ ID NO: 47483 - DNA, 271 bp, Glycine max
  Clone ID: 701038073H1
ctcactcttgttcttcggtctcctcctattctccgctgccgtagccaccgtcgaacgaatcgacgatgaagacaaccttctgatccgtcaagtggtgccggacgcggaggaccaccacctgctcaacgcggacaccactctccgccttcaagacaaagttcgccaagacctacgccacgcaggaggagcacgaccaccgcttccgtatcttcaagaacaacttgctccgcgccaagtcgcaccagaaattggacccctccgccgtccacgg

SEQ ID NO: 47484 - DNA, 270 bp, Glycine max
  Clone ID: 701038074H1
gtttgacacattgattcgttgtttcctctgcaaaattaaatcctcattgtgattgttgatgaacaattgaagtgtctctccgatttgaggattccggcgacagacagcgatgaccaccggcggcgacggtgacacctcaaacaagagctcttccaccttatcaaacgcttcggagcttgcgtcactttcaagatctccaatctgttctctctctctctccacggcctcgatatacgctctatcggggcagttgctggtcttgctgttgca

SEQ ID NO: 47485 - DNA, 270 bp, Glycine max
  Clone ID: 701038075H1
gcaccattacttgatgctgtttatgatgctggctttctctgtgctatttgattctgtgaaagctccaggcctcggattaggtgctaggtacatgtttaccatggcagttggtcgccttcttcgtgccataacttttgatctacaattctgccatcagctcgcccttggtgtgctggttctcggttcagagttccgggatatcctcatcgttgggctcagaaatattatgttccctatgctacagatcatgatgctatcagccgggtgata

SEQ ID NO: 47486 - DNA, 269 bp, Glycine max
  Clone ID: 701038078H1
ccaagacatagcaaacgatccaaactcttttttcatttgcagcatcaaaatgagtggtagcaacgatggtcgcggcactggagctctaggtttttgaaggtggctagtgcagctgccgctacagccgccgttgccggcgtttatatgccattctttcatcctcaacctctgctagctctgagatggaagtgccgtttggcagcgcacggcgtgagagcaaagaacgtgacgatggtggctccgggtctcatcctcgcgagggtgccacc

SEQ ID NO: 47487 - DNA, 275 bp, Glycine max
  Clone ID: 701038079H1
gtgatttcagtgagtgatcggtgttcacttgatctcatcataatcgtcagcgtcaattgaagaagatgccgatcagaaacatcgccgtcggaaggcctgaagaggcgactcaccccgacacgttgaaggcggctttggcgagttcatctcaaccttcatcttcgtgttcgccggctcaggctccggcatcgcctacaacaagctcaccgacaacggcgctgccacccctgccggcctcatctccgcctccatcgcccatgcattcgccctcttcg

SEQ ID NO: 47488 - DNA, 270 bp, Glycine max
  Clone ID: 701038082H1
cacccaccacccaccgccgccacattcacaccacgcgccgccgcttccaatttccccggagacccaccctttgcatggcagtgagctttctggcgcgcgatgtatcggacctctgccttgggaagccgccgctgagtcgctctccgccgccgccaccgtcgccgacgccttggccgcgctcaagagctccgaccacgagacccacgtcagcttgtggagcttctgcgagaacaagaacgaggttcgttgcgttgggaaactgtgcatggt

SEQ ID NO: 47489 - DNA, 269 bp, Glycine max
  Clone ID: 701038083H1
agcgcctcttgatagggtctcccaccctaaccaagccagatcccgttttcaattccttctcagtttccttttctctgaaaaaacatgttgagggttgcagctagaaggctctcttcttctctctcatcttcttctcgttgcggcccaatcacgccgcttccgcttttctctctcgaaacgacgtcgtcgtcgatgaccgcagatctgctccttcctcccatccccttcttcccttcagaggttatgctactgaatccctgatccacaca

SEQ ID NO: 47490 - DNA, 269 bp, Glycine max
  Clone ID: 701038084H1
attcaccttctgttctattggatcctctttgagaatgtgatgtctttgcaccgtaccaaggcaacatttataggtctcttagagtatgggagggctaatgaatgggttgtgactgaaaaacttggtgactctgtcataataataagaataaatcaggagatgctgccaagaagaataatgccatcaaggccacccccaaaaagactcgatccaaatttgttgaaagacttaatttactggagttgggatttgctgccttcctcttcgta

SEQ ID NO: 47491 - DNA, 268 bp, Glycine max
  Clone ID: 701038085H1
cagacgccgtagagtcagagagagagattcactgaaacagagcgcagaagaaaatacataaactaatccagaaaatgagcagcggcgctggaaaggtggtgtgtgtcaccggcgcttccggttacattgcttcctggatagtcaaattcctcctcaatcgcggctacaccgttaaggccaccgttcgcgacacaagtgatccgaaaaaaataaaccacttggttggcctcgacggtgctaaggagaggctgcacctctacaaggcgaa

SEQ ID NO: 47492 - DNA, 271 bp, Glycine max
  Clone ID: 701038086H1
cttgttctgattatggaacagctgaagccaagtgctgctaactcttcccctctcactcccctcggcttcttggacagagcagccaccgtccacggcgacgtcccttccgttgtttataacaacaccaccttcacgtgtcccagacgcgccgccgatgcctccagctggcctccgccctctcctcccttggtatccgccgcggcagcgtcgtctccgtcgtggcccccaacatccccgccatgtacgagctccacttcgccgtccccttcgc

SEQ ID NO: 47493 - DNA, 270 bp, Glycine max
  Clone ID: 701038087H1
ctcggctgaaggcgaggcaaggggtgagaacggttgcaatggcggaagtcgacgtggtgggtcccaccggggagagcgtgaagcgtgacggggttagcatcggagaagttgtgatgaaaggagggtgtgtgatgttggctacctaaaagacccttcgggaacagcaagttgtttcaagaacggttggttctacaccggagatgttggtgtgatgcatgaagatgggtacttggagatcaaagataggtcaaaggatgttataatcagtgg

SEQ ID NO: 47494 - DNA, 270 bp, Glycine max
  Clone ID: 701038089H1
aatcaatctctctctctctctctctcaatgacgctcaacatagcggctttggctgtgttgtgtatttctgtctttggcatcgctgtggtggctgaagatccatataggttcttcacctggaatgttacatacggagcatttatccacttggtgttcgccaacagggaatacttatcaacggtcaattcccaggtccagacattcattctgttaccaacgacaacctcatcatcaatgtcttcaacagcttggaccagccatttctcctct

SEQ ID NO: 47495 - DNA, 266 bp, Glycine max
  Clone ID: 701038090H1
gtgagacagtgtaactcggaagcgcacagcaatggcaagagcgactctccttcacttgctgcggtcacagagcctccgccacgtgtccaaaaacgctccttcagcatatcgttgttttgggtcctctacctgtcacgacccattagccccaatccatcattcaaaacttcctcccatcttgctgttttccaaagaagatgggcatcacaaatcccaactacagaggaagacgacaagattagcatcggacctcgtagtggaggaca

SEQ ID NO: 47496 - DNA, 269 bp, Glycine max
  Clone ID: 701038091H1
ggatccgtgattttgattcatctgtacttgtagagcctttttctactgcaaagggatggatgacaagtgctaactaagcactttcttcttcttcttcttcatcccttcatcgccaaacacaatgaaggaattggggtggttgcaatcctcttttcaatagagttcttggacgttatcgtctacactgtaagcaaagcagccatgaagaagggcatgaatgactttgtctttgtcatgtactccaatgccttcgcaacttgcctcctcct

SEQ ID NO: 47497 - DNA, 271 bp, Glycine max
  Clone ID: 701038092H1
cagggatgcaatgaaggaatttgcacagaaattggagaaactggcagaggagttgctagacctgttatgtgaaaatcttggattagaaaaagggtacttgaaaaatgcattttatggatcaagaggtccaaattttcggacaaaggtagcaaactaccctgcatgcccaaagccagagttggtgaagggtcttcgtgcacatacggatgcgggtgggattatccttctcttgcaagatgacaaggtcagtggccttcagcttctcaaaaat

SEQ ID NO: 47498 - DNA, 265 bp, Glycine max
  Clone ID: 701038093H1
ctttccttctgtaaactggcttatttcttattcaaaatactcaacggcacttgaaaccttttatgagcaatttgatccagattttatcaacattaggacaaaggctcgtgaagttctgcaaagggaagatgacctgatgaaattgttcagcttgtgggcaaggatgctttagctgaaggagataagatcaccttagaaactgcaaagcttttgagagaggattatcttgctcaaaatgcctttacaccatatgacaaattctgcc

SEQ ID NO: 47499 - DNA, 269 bp, Glycine max
  Clone ID: 701038094H1
caagattgaaagtgttagtccaggaagtgaaatacgaaggtggttgaataatgagcatgagggaaattgtgtaagcttagacgcatctcctgttatgcatgaccataattggattggcgttgcgttttgtgcaatatcgtcgtacctcatgaaacactctcagcaatgagtttttcagaaacagaatatccattccatttgtttggtgatattcgagtggatttatatggagatttagatctagaacttgttttagacaaatcagatca

SEQ ID NO: 47500 - DNA, 274 bp, Glycine max
  Clone ID: 701038096H1
gttattccttgcttcacttgtatgctttagtttctagcatcgatcactcctaattacttgctgcatttctctactccttgtgcttgacacttttgtcatttaaaatggaacttaattttaagtaccaacttagcctttctctgttacactgctcttacctgccctgtgtacctctcaagactcttttacgtgctccagagcaacctattatggtagcccagattgttatggaaatccaaggggagcttgtggctttggagaatatggaaaaacg

SEQ ID NO: 47501 - DNA, 273 bp, Glycine max
  Clone ID: 701038067H1
ctaactccctaccctattccgctttctctcatccatcatgaaacgaggaaagtccaagaccgaatctaagagagccgatgccaaacttgctgtgaataagaagggcgccgccaccaagactaggaaacccgccggaaagggaaggcagcgaaagatcctaacaagccaaagaggcctccaagtgctttcttcgttttcatggaggaattcaggaaggtgttcaacaaggaacatcccgacaacaaagcagtgtctgctgtgggcaaagctgct

SEQ ID NO: 47502 - DNA, 275 bp, Glycine max
  Clone ID: 701038038H1
gttgcatttcacacaccaacttcccctagaagagagaagagagaagagactcttccttccatcctgcaactcaaatcatcatgcaagactccagctcaatgaagatctcccctctggatctcatgtccgccatcttcaagggaagctcgacccctccaacgtctcctcctccaccaacgccgccgccgccgccgccttcctcctcgagaaccgcgacttcctcatgctcctcaccacctccgtcgccgtcctcatcggctgcgtcgtcgtcttca

SEQ ID NO: 47503 - DNA, 277 bp, Glycine max
  Clone ID: 701038041H1
agagtgcagccccttcgccttgctgaatgggatactgaagacaaagtcacattttttatgagtggaagaacttatacatttcgagattttgagaaaatggccaacaaggtatttgcacgaagatattgcagtgctggatgtctcctgccacatacttggaaaaagagttttggcatgaaattggttgtggaaaaatggaaactgttgaatatgcatgtgatgttgatggcagtgccttttcatcatctcccactgaccagcttggtaacagcaaatg

SEQ ID NO: 47504 - DNA, 277 bp, Glycine max
  Clone ID: 701038042H1
ggcctcgccaccagaccaaagtgctggcttcgtatatattccatcaggttcttcaggacgcaattttcaggaagaaacccatttgccaagtcgattccatgcttgggaaagagagcacttgccttcattggcgttaaaccatgttggtagagaatcaagttggagagcataccaccagactgccagtgtgtcagacccaagtatcagatccagcagctttcgattaagacacgaatccgacagaatgccttcacaaaatcggtgatatacttgtttt

SEQ ID NO: 47505 - DNA, 275 bp, Glycine max
  Clone ID: 701038043H1
ttcaattccattcctttactttcatttcatcctccacaattttccaattccatttctctttcccaaattctccctaaacaagtaacaccaataaacacaagcttctctctttcagctcttcgagggtttcaattctccattgagatccctcatctgggtacctttcaaatttgaggcaccttcgatcctgtggtccaagtttgcagctttgactttttttctcaacatgggtgggagcgagactcgaagggtgtggttatgggtcgtttggttga

SEQ ID NO: 47506 - DNA, 274 bp, Glycine max
  Clone ID: 701038044H1
cataattagcatagttattatggggagggttgagtactccccattgtttgagacaagaaggtgcagaggaaggttcatctacaggtcctttgcaatctcattatttgtgaccatatgctttatatggcattacagatttagcacataacaaagggtgaagatggaaactgggcacactttggtatgcttgcttcagagctgtggtttggcttttactgggtccttactcaagcccttagatggaaccttgtgttcagacaacccttcaaaaaca

SEQ ID NO: 47507 - DNA, 273 bp, Glycine max
  Clone ID: 701038045H1
ctcgccgtcctccactccctccaccaaaatccgagtgttcgagcgcaacggccgcgtcgggggacgcatcgccaccgtgacggtggcgcccgagaccttcgaggccggagcgtccattctccatccaaagaacctgcacacatggattacgttaagatcctgaagctgaaggtcaaagagccgaccgcgtcggaggattccctctctctcggcatttgggatgggaacaagttcgttttcaaaacggtgtcgccgcttagttccactgttccc

SEQ ID NO: 47508 - DNA, 278 bp, Glycine max
  Clone ID: 701038046H1
agctagctagctcataattacaataatgggttccctccctcacgtagtagaggactgcatgggcttcctccatctttatagcgacggttccattttccgttccaacgacatagaattcaaagtttcacccattcaagacaatccataacctataaagattatctctttgacaagagattcaacctttctcttcgcttctacaagccccaacacgtagcacccatagacaataacaagaagcttcctattgtgatgttccttcacggtggaggcttttg

SEQ ID NO: 47509 - DNA, 278 bp, Glycine max
  Clone ID: 701038047H1
tcataataacttgtacattgagagcactactacttggagaattatttacctaccaacttttcaatttcaaagccaaaaatgtcaaccaccattgatgtccctgcagaaacgacaagcaagaataatattggcaatggaattagaaagttccaggtgcacccccaaggccagaaggagggtggaagacagggttagccataatagactttgttctaaggttaggtgctattgcatctgctcttggtgctgctgccaccatggcaacgagtgatgagaca

SEQ ID NO: 47510 - DNA, 122 bp, Glycine max
  Clone ID: 701038048H1
attcaagaatagctctaagacgagaccaaatacgatggttgtgtgcttgcttgttgccatcttggctctgacatcctctgttgtctctgcctatgaccctagtcctcttcaagatttttgtg

SEQ ID NO: 47511 - DNA, 272 bp, Glycine max
  Clone ID: 701038049H1
accaaatctccgttgcttccttactctccagcgcctactcatatcacagatcatggataattcatagtactactatttcgtacaagtattcacgaaccattccattccaatttccattcagcagcaaccaaatcaccatctcttttgcatcattagttttttagttagattaccctcttccgtttcaccttcctttcatgcttacgtcaccaccactcactctttttctaccctaaaccattgaatcgatctaaatctctcccaaatcgcaa

SEQ ID NO: 47512 - DNA, 274 bp, Glycine max
  Clone ID: 701038051H1
ctcaggcgctgctgcccttcagtccttcagcaatggtttacgtgaagtcacagaaatcaaaagcctacttcaagaggtatcaagtcaagttcaagagaagaagagagggaaaaaccgattaccgtgccaggattcggttattaatcaggacaagaacaaatataacaccccgaaatatcgctttgttgttcgtttcagcaacaaagacattgttgcacaaataatatctgctagcattgctggcgatattgttcttgctgcagcatatgcacat

SEQ ID NO: 47513 - DNA, 271 bp, Glycine max
  Clone ID: 701038052H1
cttgtttctgtctgcaattttcaattccaactctctctcacatgcaattctccatccaacaaaagtttctcatcatttctgtttcccataagcaattaattaaaatactgaatttggtataatttctttctcaaatatattagttttacaattattttatttctttttccttggattgtagccggggtttcttgttgtgagagaaaaacctttattctctgttttgggaacatctggggtctcaatttagtggaagttaaattttgaaact

SEQ ID NO: 47514 - DNA, 274 bp, Glycine max
  Clone ID: 701038053H1
ttatgattgggacaacaagagattgaatataggaactacaaatgatcagcatcaaatatatacaagtttagagcaagtggtagggacaggtgcagatccaaaacctggactcttcccctcttatcccagcatgaactcaatacagctccaagtttgccattggccacatggcttccacctcaagcttctgcacctgccctccttggaaaaggagcaaggcaatggcgaagtggagattggatgtgctcaaattgcaacaatcataattatgctt

SEQ ID NO: 47515 - DNA, 273 bp, Glycine max
  Clone ID: 701038054H1
gtggttgtgatggtggtgtataacactcgatccagcacataacaatggaaacgcagctttacgtgttttctctctagattctgctcttaaacgccgtcgttttcaaactctttttttccccttcgcttctctgtctttgtaccgaaaggggggaaaatataattaacaccgatttcgcgaccaattcttcttctgcgttgaattgggacaacgagaaattggatctcagtttttggcaggaaataaaaattgcatttgagtgtaaaataacag

SEQ ID NO: 47516 - DNA, 275 bp, Glycine max
  Clone ID: 701038055H1
ccgaacttctccttctccttctcccctctcactctcactctttccatggccgcttcaccacaatcctccgctccgactgtgtcgcctggtgatgctaacatcaacaaagatggtgtatttcaattgattcaagcacatcagaaaaagctgctagacttccaccagttgaggaaattcgaactgtccttgatcgtagcgtgcgtgggatgctctctacattctcgaagaagttcgatggttatccatcagggtctatggttgactttgcttgtgat

SEQ ID NO: 47517 - DNA, 85 bp, Glycine max
  Clone ID: 701038056H1
ggtcactggacagagtgatcatgtgcgatatcgacaaggacgtggttaatttctgccgggaatccctgattgtacatcctgaggc

SEQ ID NO: 47518 - DNA, 275 bp, Glycine max
  Clone ID: 701038057H1
agacagcagactttcttttctcttttgtagatcgagatcgtagaaattaagaaaggcatgaatagaggtgttttgcaaagctcaccggtgcaacaaatgatggccagaaaccctaacaactggtggaacatcaacaccatcgccctcctcctccttctcaagcttctgcacctttcttctccactccttccaactttctaactccttataaccccacttctcttcctcttccttcttggcatgacaacaatcaagagctacccgagtcatggagc

SEQ ID NO: 47519 - DNA, 275 bp, Glycine max
  Clone ID: 701038058H1
ctcactcttgttcttcggtctcctcctattctccgctgccgtagccagcgtcgaacgaatcgacgatggagacaaccttctgatccgtcaagtggtgccggacgcggaggaccaccacgtgctcaacgcggagcatcactactccgccttcaagacaaagttcgacacgacctacgccacgcacgaggagcacgaccaccgcttccggatcttcaagtaccacttgctccgggccaagtcgcgccagacattggacccctccgtcgtccacggcg

SEQ ID NO: 47520 - DNA, 270 bp, Glycine max
  Clone ID: 701038059H1
ggagaaggtcaatggcagagtctgtgggtgtggctgggttcggtgtttcaggctcattctctcttactaggcccacaatcttttctcgatcttccaataatatctctctctttcgctctcaatctcatttccctgctgcgcattcggttccttgacacgttccaacccacacgtgcacgccgctgtcacttccgactccaaggccgctacttcgcttgacctaactcaacccgatctcgataatagcggcggcggtgccaacggtaacgg

SEQ ID NO: 47521 - DNA, 267 bp, Glycine max
  Clone ID: 701038061H1
gtccatatagtattctttttgtccatagaatcccaattagaaaacagagcttcagagaaggtgagaatggtctaagaagccttgcatggcgagccaaagaattggagacacgggtttgtctgagtcgggaccttcaagtcccatgttccttatggagttcttcatgggattagtacttcatcaggcctaatcaatcaagggtctgcttttgcttttggggagttggaagaggcaattgttctgcaaggcattaagataagaaatgat

SEQ ID NO: 47522 - DNA, 275 bp, Glycine max
  Clone ID: 701038063H1
ctcaaactcactctttctaagttttttctatctctttctctctctctctgtctgccatggttctctccaaaaccacctccgaatccgacgtctctgtccactcaaccttcgcttctcgatatgtcagaacttcgcttcccagtttaagatgccggaggagtcgataccaaaggcggcagcgtatcacataataaacgatgagttgatgttggatgggaacccaaggttgaacttggcatcatttgtgacaacctggatggagccagagtgtgata

SEQ ID NO: 47523 - DNA, 109 bp, Glycine max
  Clone ID: 701038064H1
tcggtcggccttcggctcgagctcaacggcacttgacaccttttatgagcaatttgatccagattttatcaacattaggacaaaggctcgtgaagttctgcacaaggga

SEQ ID NO: 47524 - DNA, 273 bp, Glycine max
  unsure (1)..(273): unsure at all n locations
  Clone ID: 701038065H1
ctactgatgcctttttgggcacccagatttccaccattctgnataacttcacacactatataacagaaaatgagggggggcttatggcaactcgggcaatcaatcactcgccgtcttgcccagggtgataagaaggctttgctcgtaggtattttgcctcagatgctgagctgaaaaagacagtcgtttatgacttccatgttgctaatggagggaagatggtgccatttgctggatggagcatgccaattcaatataaggactcaattatgg

SEQ ID NO: 47525 - DNA, 273 bp, Glycine max
  Clone ID: 701038066H1
tgagaatgagctgaaggacaagaagttttttggaggagaggaaattgggttggtagatattgctgctgtcttcatagcattttggatccctataattcaagaagtattgggtttgaagttattcacaagtgagaaattcctaagctctacaaatggagccaagagttcatcaaccaccctgttgtcaaacaagtccttcctcctagagatcaactttttgccttctacaaagcctgccatgaaagtctttctgcttcaaaatagacttattta

SEQ ID NO: 47526 - DNA, 271 bp, Glycine max
  Clone ID: 701038037H1
cgtccgcgagcttatagctgatgatgcctggttgaatggtgaattcattactactgttcaacaacgtggtgctgcaattatcaaagctagaaagctttcaagtgcactatcagctgctagtgctgcttgtgaccatattaagattgggttcttggaactcctcagggcacctgggtgtcaatgggagtatattctgatggttcctacaatgttccagctggactgatctattcattccctgtcacttgtgccaatggggaatggacaatag

SEQ ID NO: 47527 - DNA, 128 bp, Glycine max
  Clone ID: 701038006H1
caacaactcaaactcaagcaagcctctctcgtatactcttagcttttattccttctctctctctctctcgctctctttgcgtgctaaaacagctgactaagagaagatatagccatatatgtactctc

SEQ ID NO: 47528 - DNA, 91 bp, Glycine max
  Clone ID: 701038008H1
ctttccaatttgaattgttccattttcatttctttcgcaaaagctgcaactacttgctcagaaaaacagtttctaagttaaggccatccag

SEQ ID NO: 47529 - DNA, 282 bp, Glycine max
  Clone ID: 701038009H1
gatggcttctcctcttcttactccttacaagatgggcaccttcaatctgtcccatagagttgttttggcaccgctgaccagacagacgtcttacgacaacgtcccacaaccccatgccatcctctactactcccagagaacttccaaggaggccttctcattactgaagccactggcgtctctgacacggctcaaggctatccgcaaacccctggcatatggactaaagaccatgttcaagcttggaaacccattgtcgatgccgtccacgccaaaggcggt

SEQ ID NO: 47530 - DNA, 282 bp, Glycine max
  Clone ID: 701038010H1
gaaacaccaccatagtttttgtgtaacttaaacgtagaaaatattatcaagttgttgcacaaatcattatgggtactctcatgcttctcaagaagttcaccctcctctttctcctcatttctggatcacttttatcaacttcctttgcaggtagagtacgatccaactctatcaagaacttcgctaaagatgtgaatgcaatcgaagagggaacaccaaggaaaccactgaataaggaagaagtaagaaccatccatgagaggcttcttagggctaacacaa

SEQ ID NO: 47531 - DNA, 93 bp, Glycine max
  Clone ID: 701038014H1
cttcttctggtagtttagacacctctgcaagtgcaaactccttcaccaacttcaccttctccacacacccttacaccgcgacttctctctctg

SEQ ID NO: 47532 - DNA, 283 bp, Glycine max
  Clone ID: 701038015H1
cgcatatgcaaactatacgagacaaaaatttaaggaacattatataaggtattgtaggtttgtttactgtaatgatcttgttccgaggttgccctacgatgacaaggcaatgatgttcaagcactttgggacatgtcttttctttacagacgctatgaactcgaggttcttgaagagcaatggaataagaactacttctcactctggtgtgtgatacccatggcatacaacgcgattttagaaataataaggagtttcattattgcccgccaaaatggagctt

SEQ ID NO: 47533 - DNA, 87 bp, Glycine max
  Clone ID: 701038016H1
tgttatcgctgttgtgactacggcacaaggggctgcttcttccctcatgtcttcaaagggagcgaattttccattcttcaatttttc

SEQ ID NO: 47534 - DNA, 276 bp, Glycine max
  Clone ID: 701038017H1
attcatccgaatctgattctgatgatgattcaagtgaagataaggtatttatataatctagaaagcagattttataatgaactgctgatgatcttgactcttgcatgatttgtctgatggtatatagtgaaatgaaatgctattaagaatttaagtccaaaatactaatgattggcctgacaaaaggcagaataataagtgttgattgtaacacaatgatggcattgtcattgctagatatatgagagatcgtagattgttgggcagtgaagcatt

SEQ ID NO: 47535 - DNA, 277 bp, Glycine max
  Clone ID: 701038018H1
aaaccctaattttttcttcttcaccgcgcaccacactgagaggaagagggagtgagagtgttcttcgtttgctaccttctctcagaaatggttacgttcaggtttcaccagtaccaggtggtcgggagggctctcccaacggagcagatcagcatccgaagatctaccgaatgaagctctgggccaccaacgaggttcgcgccaagtctaagttctggtattttttgaggaagctgaagaaggtaaagaagagcaatggtcaagttcttgctatcaa

SEQ ID NO: 47536 - DNA, 278 bp, Glycine max
  Clone ID: 701038019H1
ggtttcttcaatcggaatcgcgaacaacatggaagtgagaattgggcaaagggtgtctcgcggaatgctccctctcctcgctctccacaccgtcagcgagtattaccgctccgaccacaaacctccgttcaccgccgccctcacgccgccaacaccctcatctacctccgcccctccttcctcgatcccctcattccccccattgaacaagtctggttcaacccccacctcatcctcaagaacacggacttgaaacgcttcttgttgtcgccgtttta

SEQ ID NO: 47537 - DNA, 276 bp, Glycine max
  Clone ID: 701038020H1
ctgtcatgtggatcttttgctggataaacttgcaacctaatttttattgatttttggatacaggtttttatgagactcgaattgcatattatgcatggaggggtgctaaaggataccgcttttctgccatccctgattattaagtgtgacggtaaatgagaaatagagctatctataccgtgaaaacatagtaatgatcaaattcggttgcaacttgtatgcttcaatggcaaagatggaacaaaatggtagaaaagtgtaatcgtacttgatact

SEQ ID NO: 47538 - DNA, 293 bp, Glycine max
  Clone ID: 701038021H1
cggcattcggctcgactcgaccgaatcggctcgaggaccggaaatacccaaacggaccgaggccgaaccgggcggctggcaccggttactggaaggcaaccggggcggataagcccattggtcagcccaaaccggttgggattaaaaaagctttggtgttttacgcagggaaagctcctaaaggggacaaaagcaattggatcatgcacgagtatcgtctcgcagacgtagatcgctccgttcgcaaaaagaacaccctaagggtatatacactccgtacttctttctagttc

SEQ ID NO: 47539 - DNA, 280 bp, Glycine max
  Clone ID: 701038022H1
ctctgtttctttgtttctttatcgaagtttcaacttggtttccttctaatgggaacctctcttctccgctcccacgattgtcttcaaggccaccacgatgccttgtccccaactccatcttccatcagatcacaaagaaaccctaaccctagccccaacccttaccagactcgccggcggaggctccacgacggcgaccgctccggcatggtggtgaaaggccccagcgcgcacctcgtcatgggccatgtcaagatcctcaagagaggcgagacgctca

SEQ ID NO: 47540 - DNA, 279 bp, Glycine max
  Clone ID: 701038023H1
accattttctcactacggtaatcaactggcaaatacttggacaatggcctcagaaaatggagacaaactagagcttgctttcagtgctgttcctgatcccaagcccaagaaggattgggtcattttgtcccttagggtggtcgcttttttgccacagcatctgctacacttgttatggcattcaacaaacaaaccaaaggcatggtagttgctaccattggcaccaacccagtaacaattactcttactgcaatgtctcagcacactccagcttttata

SEQ ID NO: 47541 - DNA, 280 bp, Glycine max
  Clone ID: 701038024H1
agctaacatatagcaagagagagagagagagagagatcacatttcctgagctataggctatagccttccataatcttataacaatggaggggaccaccagccaaagcacgtttaccttcatccctagcacaattgagacacctagtcaagcatgcctgagatctcatcatcatcaccttcccctggcggctctcttgcaagagctgcacaaagttaccctcctggatttcccagaacaggtatttgcggaggttatagggacatttctgttagtgtttgt

SEQ ID NO: 47542 - DNA, 278 bp, Glycine max
  Clone ID: 701038025H1
catccgtctacaagaattgggttttcactgaccaagcattaccagctgatctcgtcaagagaggattggcaattgaagatccctctgcaccccatggccttcgccttgtgatagaggactacccttatgctgttgatggacttgaatatgggatgctattaagacatgggttcatgaatatgtctccttgtattacccaacagatgcagcagttcaacaagatactgaactacaagcatggtggaaggaagctgtggagaagggtcatggtgacttaa

SEQ ID NO: 47543 - DNA, 276 bp, Glycine max
  Clone ID: 701038026H1
cgtttgttcttgtgatcgaagctaagcgaagaaaatgggtggatcagtgagggacgtgaagtcgaagggcgaggtcgacgaggtggtggcgagtggctctccggttatcctccacttctgggcgtcctggtgcgaacttccagcacatggaccaactcttctctcacctttccactgatttccccaacgcccgcttcttaagggtcgaggccgaagagcaacccgagatttctgaggcttactccgtctccgctgttcctttctttgccttctgca

SEQ ID NO: 47544 - DNA, 277 bp, Glycine max
  Clone ID: 701038027H1
caacaaaacacacttacataaaaaatcatccttatctatgccacttccacttggacttccacctcacccactttctctgcgccatggaaacagtacgttgtctggcatgtgtacttgttcaaggtgacatatgacctaaacaatattagaacttaatctgatcacaaggcagtttttttgagctgatctggatgggaaccggtgaagaaagcacagctaaagttcctaaaccatcttctacttcttcaattcagataccactggcaccttcatatcc

SEQ ID NO: 47545 - DNA, 278 bp, Glycine max
  Clone ID: 701038028H1
cattcacactctgcggagtcccaaagcaagcactaatctaacaaacgcaatttaaaaaccgcaacaaacttttctctctttcgttcacacacttattctctggcttctttttcttcttccattttcgcttctcgtagcattttcggaacactcatggcttccattgccggatccagctgcgtcgctctccgaaccgccaatttcgcctcctccgataaccggaaaatcggtcagatccggcaatggtctccaattctcactaatctccgtcctgtttc

SEQ ID NO: 47546 - DNA, 280 bp, Glycine max
  Clone ID: 701038029H1
tgtggtatgtgggttgctgcggcaacaaaaccattcatcaaattccaattccacagacacactacttctcttccgcttcttctgatggcaaaccaagcttcactctccttttcttcttccgtgtctcctgttcacgcgcctctcagcgcgtgggcacgcacaacggaagctttcattgcgacgaggccctcggctgcttcatgattcgcctcacgaacaaattcaacagcgccgaaatcgttcgctcccgagaccctcaggtgttggaggttctcgatgc

SEQ ID NO: 47547 - DNA, 281 bp, Glycine max
  Clone ID: 701038031H1
ataagttatgtatttataaaggttcttatatataaacattataaagtttgcagatcgtttagctgaactagattgttggtattacctactagctaagcattcatttattttgtaatttaaaatcgttgatgtataagaacctcttaagttatgtatttataaataattttgtgcttcgatccttgaagacagaaaaaaaaactcatacaggtaatctcatcataatatttttagtattcctttgaaaaaaaatcaacagttatataaactccatgtataat

SEQ ID NO: 47548 - DNA, 92 bp, Glycine max
  Clone ID: 701038032H1
cacacctccatgtgctgctcaagcttcttctgtttcacgtctacttgaagtttataactgctcctcaattctaaactcgccttccccattta

SEQ ID NO: 47549 - DNA, 280 bp, Glycine max
  Clone ID: 701038033H1
caattttgtgaacaagagaaattcgggaccagaagttcgatgagaaggaaaacattgtgttcatcacagtggtgtgttgtagccccgagaagatacagagacaagctttgctacaaaggtggaggctctatcaagagcattgaatactggaactgcccaagcccaaggccgagaagcctaaagcagaccctcccaaagctgagaagcccaaggccgagcccgagaaaaagaaggacggtggcggcgagaagcccaaggccgagcccgagaaaaagaagga

SEQ ID NO: 47550 - DNA, 273 bp, Glycine max
  Clone ID: 701038034H1
gcgaaaagcaatagaattcaaagagagagtttcttgttctgtattttttgatttgatcatttcaatcttcaattttcttttatatatccaccaatccgcaaagtgcaaatttctaatctttcacgtattgggttcttctctttccctcttcgtctccgatcgatccaattctcttcccatggctacgatcggacacaacaatctcaatgccaaattggttcttctcggggacatgggtgctgggaaatccagcctcgttttgcgctttgtcaa

SEQ ID NO: 47551 - DNA, 275 bp, Glycine max
  Clone ID: 701038035H1
gcactatagaaaaaaaaggacattcattcatctatggctacccttattgctcccagcaaccactctccccaagaagatgctgaagctctcagaaaggcttttgaaggatggggaactgatgagaacactgtcatagtaatttgggtcatagaactgtgtatcagaggcagcaaatcagaagagtttatgaggaaatttaccaggaggatcttgtgaagcgcctagagtctgagatcaaaggagactttgagaaagccgtgtaccgatggatactg

SEQ ID NO: 47552 - DNA, 283 bp, Glycine max
  Clone ID: 701038005H1
cgctggagcttcgaggatattgaggttactgacatttcactggctgattacattggagttgcggcatccaagcacgccacatatgttcctcacaccgccggaaggctactccgtgaagcggttcaggaaggcgcagtgccccattggtgagatgctcaccaactctctcatgatgcacggtagaaacaatggcaagacactcttggctgttaggatcatcaagcatgctatggagattattcatttgttgactgaccagaaccccattcaggttattgttgat

SEQ ID NO: 47553 - DNA, 279 bp, Glycine max
  Clone ID: 701037971H1
ggtgagtgtgagtgagtgtatcaatcggccacacagaaatgggcagtgcttctctgattccagtttcctggttgccttggcggccactttctcctttcaagggaacggtgaaaaccttggtcgcaaaaccatggctgaagaagattcagcaagcaagacccctcatttccgtggttaacaaggctgcctctctatcttcccccgtgacagcacccagcgtcggcgttcggtttcggctggacaatttggggccgcaaccgggttcgaggaagagggcta

SEQ ID NO: 47554 - DNA, 279 bp, Glycine max
  Clone ID: 701037972H1
cgcataatctagggtttgttcgttggttcgcaacaatggcgatgaggagattctacaacgagatcaaggggaagagggtgagcgaggttccggagcacgtgaagccgatgctgtcgctgaactacatcaagaaggcgattcagcgagccttcgataattaccatgccaagtacattgaaaccagctcccccgatcccatcttccatgtctgctacggcggcatgatcttctcctacctcgttgctctcccccacgagcgccgccacctccagcacgccc

SEQ ID NO: 47555 - DNA, 279 bp, Glycine max
  Clone ID: 701037973H1
cgcctccacccccgcaaatcctcgatgatgctatttacgccgattgacaccacactcctcaaaaagcaccttggacctcctcatcaaagaagtggagaagaaagtccatcaaaggtcggagattagagaggacacaacgaagatggtgaagaaggctccacggttgccgttgatgaagtaaagggatagcacggagagagaaatggaggaaatagagaagcatgaaaaaaggatggtggcagcgatgcgttactaggatcgacagacaaagacaaatga

SEQ ID NO: 47556 - DNA, 280 bp, Glycine max
  Clone ID: 701037974H1
gtgattctgaaaatctgaaatttcatttctctctgtataaatatcctagtccttatcagcttcactatttcgattgaacatcgccgaagaaggtattgacgtcgatgatgaaaatgaaattggtgaaaacattactgcttctcctttgtgtgaaactcttctgttatgcagtgattggtgctcctcaaacttgtcctgctaacaatgaggataaatgcggcgattcagatgaatggaaaggggagtttttccctgacattcccaaaattaaatatgaggg

SEQ ID NO: 47557 - DNA, 280 bp, Glycine max
  Clone ID: 701037975H1
gggagaaagggtgtgagaatggagagcaaagaggaagatgtaagggttggagcaactaagttctcagaaaggcaaccaattggtacagcagctcagggtgacaaggactacaaagaaccacccccagcacctttgtttgagcctggtgagctaaagtcatggtccttctacagagctggaattgctgagtttgtggccactttcttgttcctctacattaccatcttaactgtcatgggtgtcaacaggtcaccctccaagtgtgcctctgttggcattc

SEQ ID NO: 47558 - DNA, 283 bp, Glycine max
  Clone ID: 701037976H1
agccggtggttcgtgtggcttttggcggtactaggcatcatcggagccacactcttcatagtgagcttgatccaaacctcggagaacaacttcctatgttccataacaagaacgatgcagcagcagcagcagcagttcaccgatggccccacatcgatgcaactcaaagccatcctccactacgcgacctctcagattgtccctcaacaatctctttccgagattacaataaccttcgacgtgctccaaagcctccaccgccccgccaacttcctcgtgtttg

SEQ ID NO: 47559 - DNA, 286 bp, Glycine max
  Clone ID: 701037978H1
gaaaagagtagcgggcagtgacaaagcaatagcgtggagtgggtcttgcgttgtgttggaatcccaaattcatttctgtttctcattctcaattcttcttctattctcattctgatttgccacacacgcagaaaggttgaaaatagtgggacttgattcactggaggtggagaaagatggctaacaacgcagctgcttgtgctgagagagcaactagtgatatgctcattggtccagactgggcaatcaacatagacttgtgtgatatcattaatatggaccctgg

SEQ ID NO: 47560 - DNA, 290 bp, Glycine max
  Clone ID: 701037979H1
ggttcttacacatgctagaaactttttcttttcacattcatcctgaaataaaaaaaaaaattattagatttatattctcttagctcagaacaagacttaagagttaagagggtcacctgttttacaagttttctgatgattaaacagtattgattggctatattattatggtttattgataacactggttattcactagaaatgaaaaagaaaaagaatactgtgatcaatagtttaatacttttgttaccttgcaattttgaaggaaaggagcaggtgtttgtctatcc

SEQ ID NO: 47561 - DNA, 155 bp, Glycine max
  Clone ID: 701037981H1
ccactcttggtggcacgcggatttagacccgcaaacgaaatattgctgcgccgctggaccctgcagcattctcggatgcagtggtccagatttatttggataatgctggtgatctggaacttattgctaagagtattgaatcttcagaccttaac

SEQ ID NO: 47562 - DNA, 70 bp, Glycine max
  Clone ID: 701037982H1
cgcgcagcataagcggatctgcatgtggtggcgtggaaattgacgctgacttggagcttagcgtctgact

SEQ ID NO: 47563 - DNA, 271 bp, Glycine max
  Clone ID: 701037983H1
gacaaaaaggccactagctctggggagaagaatgttctcatttttgatctcggtggtgggacttttgatgtctctcttctcaccatcgaggagggtattttcgaggtgaaggccactgctggtgatactcacttgggaggtgaagattttgataacagaatggtgaaccattttgttcaggaattcaagaggaagaacaagaacgatattagtggaaatgccagagctctgaggaggttgagaacagcatgtgagcgggcaaagaggactc

SEQ ID NO: 47564 - DNA, 276 bp, Glycine max
  Clone ID: 701037984H1
cttacaaaagtttgttttcaaagtgtgttttgtttcccaaatcatactcttgtgaccacaacccttcctcctctttcttttgaaacctctttttttctattccccaaccaaacaagcaaacgctactcactcatcatcactgagatcatggctcctaatatcaccactgtcaaaaccaccatcaccgacgctcaagccaaggtcgccaccgatcatggtcgtgcctacgtcaccttcctcgccggaaacggtgactatgtgaaaggtgtcgttggc

SEQ ID NO: 47565 - DNA, 268 bp, Glycine max
  Clone ID: 701037985H1
cgtccgcgagcttatagctgatgatgcctggttgaatggtgacttcattactactgttcaacaacgtggtgctgcaattatcaaagctagaaagctttcaagtgcactatcagctgctagtgctgcttgtgaccatattagagattgggttcttggaactcctcagggcacctgggtgtcaatgggagtatattctgatggttcctacaatgttccagctggactgatctattcattccctgtcacttgtgccaatggggaatggaca

SEQ ID NO: 47566 - DNA, 277 bp, Glycine max
  Clone ID: 701037986H1
ggaacagtataagcttttctgaatgtggagggattgaaattgaggagaattgggataaggtcaagactgtatttatgccaacaggagtgtctcttacatcagagagtattgccccacttgttgcaacacttcccttagagatcaagggagaaattgaggaatttctcaaggtgattttcactctatttcaagacctggattttactttcttggagatgaatcctttcactttggtcaatggaaagccttatcctctggacatgaggggcgaacttga

SEQ ID NO: 47567 - DNA, 276 bp, Glycine max
  Clone ID: 701037987H1
gtcttttttcactcttcagttctcgttgttgttcttcgctttcctgaaactagggttttcaatttcgattcattcgttaataattaaagatgtttgggagggcaccgaagaagagcgataatacgaggtactacgaaatcctcggcgtctcgaagaacgcttcgcaggatgatctgaagaaggcttacaagaaagccgccatcaagaatcaccctgacaagggcggtgatcccgagaagtttaaagagctggcacaagcatatgaggttctgagtg

SEQ ID NO: 47568 - DNA, 153 bp, Glycine max
  Clone ID: 701037988H1
ggctcccaagggtttaacctttctggctgtgttaatatgcgtttcagcactgtcactgagtccttctgttgcgggggaagggcaaaataatggccttgttatgaacttctacaaggaatcatgccctcaggctgaagacatcgtcacagaaca

SEQ ID NO: 47569 - DNA, 277 bp, Glycine max
  Clone ID: 701037990H1
ctttcctcttggtcttaaaccatgaccaacccaaaactaggttatgccggaatctccgattccggcaaccacattccctcctccaagaaaaaccacaagaagctccttctctctctattggccaccctcctcgtggcggcctccgtggtggccattgttgccggagtacaaaacaaaaccaaaaactccgacaactccgacaccaccagcacctccctctccctctcccaccactcgcacgtgatcgttaagagcgcctgtagctccacattctatc

SEQ ID NO: 47570 - DNA, 72 bp, Glycine max
  Clone ID: 701037991H1
ctctcttgctgtctgtctgatctatctctcttcttcccgtctttgaaccacgctcctccttctgcttcaatg

SEQ ID NO: 47571 - DNA, 275 bp, Glycine max
  Clone ID: 701037992H1
tgcaggaagaaatcatggaaatgcagaaaaataaggatttggaccctgcatgcagaccaagggtaagtaaaatacactgcttgagaaggacacttactggaccatggtagattatgtgaatgtgagtcattgtttccaagtgacatctacacgaaggaagccattatgtcataagggctggggtatatatatgtatgtgagacgtgaggatgatatacaagaaaacacaaaagctttttcgtgttagtaaacgatgcgtattcgtgttgtaagtt

SEQ ID NO: 47572 - DNA, 280 bp, Glycine max
  Clone ID: 701037993H1
tagacgaggaggatctacttcatgacatcaacgtatacagaaaagttttgaaccttcctgttctggatgaaagtggcaaagcttcttgcttagctgaagagatagcagaaaatctagagcacacgaaatgtgaagactttcgtgactactaccctctgcctagttacacctccaaaattcctaagttccaaaagagcataaacaaatgcaagatcaacatcaacaccacaaaagatggggtcatcatgcctctctgtgtgcccaagttggaccccgatgc

SEQ ID NO: 47573 - DNA, 282 bp, Glycine max
  Clone ID: 701037994H1
tggggacatactttttgttaaatgctgagaactaccactggcaatggacttctttcttttcagctgcctcaacagctgtttatgtttatttgtactcaatatactacttctatgtgaagacgaagatgtcaggcttcttccagaccagcttttattctggatacactttgatgttttctcttggactaggaattctatgtggagctgtgggttttcttggttcaaatttgttcgtgaggaggatctacagaaatatcaagtgcgattaaggttttgagtcag

SEQ ID NO: 47574 - DNA, 247 bp, Glycine max
  Clone ID: 701037996H1
ccgattgctagaatggaatttcgatgctcagtcatctcttttaccattctcttctctcttgctcttgcaggagagagccatgtccatgcatcgctacctgaggaagattattgggaagctgtttggccaaacactcccattcccactgcactgcgagagcttctaaagcctctccctgcagtctgaatcgtgactcctaagaattgatgataccagtaccaaacatctctaaagagacttctcagca

SEQ ID NO: 47575 - DNA, 287 bp, Glycine max
  Clone ID: 701038002H1
ggctcgagacgcattcaagccctagatttcaatctagggtttctttgtacgctaattccatcttcaaattctgccttcattcgattcaggggggaattaaattgtttctattttttctcgaatttaccacaaattagaaatcgataaagaaaatggtgagggtgttgagaagctgcattcaatcgattttgaagctggtgaactcggtgattgggatgtcggggctagccatgattctgtactccgcatggatgattagggtttggcagaggaagatgggcgaactt

SEQ ID NO: 47576 - DNA, 281 bp, Glycine max
  Clone ID: 701038003H1
aggaaaattactaaacttgtttctgatggaacatatctgttgaagcaattccttaattaggaaagcagttcagaatcttggacagtttccttctattttgccagagaatttgtaaatatatttgctgctctggtgtctccgacatacaacttcgaagaggattcggcaattgaaaaatgaaagaaaatacgtcagtcttcattgttcgttgcaagttgagtatgtgtatccatgctatttcggtatttgctatacacctcaggtagcaaatcatactttta

SEQ ID NO: 47577 - DNA, 280 bp, Glycine max
  Clone ID: 701037970H1
ctttttccttcaagtcactaagataatggcaagcatttataacattccatcacacataaaagcctgggtctattatgaatatggaaacatagaagagattctcaaatttgaatctaacatacccataccagacatcaaggaagaccaagtgctcatcaaggttgtggctgcagcgcttaatcctgcagattatatgagggctcttgggtttttcaaggacactgatgcacccttacctattgttccagggtttgatgctgctggtgtggtggtgagagtg

SEQ ID NO: 47578 - DNA, 283 bp, Glycine max
  Clone ID: 701037941H1
cgtgaagctcaggttcttcttcctcctcacttcccttttccattttcattttcctctataaacccctcccctctctctctctctagatccaaccgcaccgatggaaacacaatgatccaaccctaatccaagcgcctcttacctccaagttttgtgattgaagctgcgatggaggaggagacctccgatgcaatgaaccttgatttgaatctgggcccaggcccagagcccgaaactgggcccatgagcaatgaagctgtgaacttggacgattggatagggg

SEQ ID NO: 47579 - DNA, 285 bp, Glycine max
  Clone ID: 701037942H1
cgcggttgcaattgcatagcatagagaaagtgcagagagagcacagcgtaacgactcagtcaaacactctgtaactctttattttattttctttctttctttctccgatcgcatagctcgctcgcaaccaccatgccttcccgaagaagaactctcttgaaggtcatcattctcggtgacagtggggtggggaagacatctttgatgaaccaatatgtgaataagaagtttagtaatcagtacaaggcaaccattggagcggattttttaaccaaagaagtgcaa

SEQ ID NO: 47580 - DNA, 284 bp, Glycine max
  Clone ID: 701037943H1
gtgaaagagaatccgaggcgaagagaagagaaaaattaagatggaggggaaggagcaggatgtgtcgctgggagcgaacaagttcccggagagacagccgattgggacggcggcgcagagccaagacgacggcaaggactaccaggagccggcgccggcgccactggttgacccgacggagtttacgtcatggtccttttacagagcagggatagcagagtttgtggccacttttctgtttctatacatcactgtcttaaccgtcatgggagtcgccggggcta

SEQ ID NO: 47581 - DNA, 288 bp, Glycine max
  Clone ID: 701037945H1
cgaaaacccccaactccaacctctgttcatcgtctaccgcgctttcttttcaaccagaactatgattaagctttttaaagtaaaggaaaagcagagagaacttgcagaaaatgcaagtggcggaccacctgttaagaagcaaagtgctggagagttgcgtcttcacaaagatataagtgagctgaatctaccaaaatcatgtaccatgcaattccccaatggcaaagatgatctgatgaactttgaagtttcaattcgacctgatgatggatattacttaggtggcac

SEQ ID NO: 47582 - DNA, 51 bp, Glycine max
  Clone ID: 701037946H1
ctttgtctttgtctcagagagagagagagagagagagcgagagagagagtg

SEQ ID NO: 47583 - DNA, 295 bp, Glycine max
  Clone ID: 701037947H1
attagggtttgccgattgagagagacagagaaatgggagaacgaaaaggaatcccaatggctttggggctcttggcgatgatcctcttcttcattgcttcctcttcctctcacctcgttcgcgcttccggtgacgccgacgacgcgatcttctacgagtcgttcgacgaggattttgatggacggtggattgtatccgacaaggaggattacaatggtgtctggacgcatgccaagagtgatgggcatgatgattatggacttcttgttagtgaacaagccaggcaatatgctat

SEQ ID NO: 47584 - DNA, 284 bp, Glycine max
  Clone ID: 701037949H1
cagtgaacagctttaggattctggaggaggagggcatgcatatgccgaccaacacgaggatgaaagcttcaaatttgctgatgcaactgatctcatgtggctcaatatcagtgaaaaaccatagttttggccttattccttcctataagcccaggttttccagttcaaaatttccttccccgctgttctcaacttcttttgtgttgggggagtttgattgcttagccgagaatccaaagctgatgagtctcagattggaagacaaagaatattttagtggaagc

SEQ ID NO: 47585 - DNA, 283 bp, Glycine max
  Clone ID: 701037950H1
cggctcgagactttggaaaggcttattctccgctctcgtctgaaacctgaaaccctttgttcttcgtcggcggaagcatgtcatcgtcatcatcaagcaacgcctacgacgtgccatgggtagaaaagtaccgtcccagcaaggtcgccgacatcgtcggcaacgaggacgccgtctccaggctccaagtcatcgctcgcgacggcaacatgcccaatctcattttatccggtcctcccggaaccggcaaaaccactagcattctcgccctcgcgcacgagct

SEQ ID NO: 47586 - DNA, 282 bp, Glycine max
  Clone ID: 701037952H1
cagaaagaagatgagcagcaactcaggaaaagtggtgtgtgtgactggtgcttctggtttcattgcttcatggatcatcaaactgcttctccaacgtggttacactgtcagggccactgttcgcgacccatctaaacccgaaaaggttgatcacttgctcaaacttgatggtgcaaaggagaggctacatctctttaaggcagatctgctggaagaaggttcctttgactctgcttttgagggttgtgatggtgtctttcatactgcttcacccgttcattt

SEQ ID NO: 47587 - DNA, 281 bp, Glycine max
  Clone ID: 701037953H1
ggttaagaagcatccctttagcatgagtgaaattaaatccttggtacggcaacttcttgaaggtgtcaagtatctccatgataattggcttatccatagggacttcatctcatcaaacatcctgctgatccatgatggggagcttaaaatatgcgactttgggttgtcaaggcagtatggaagcccgctgaagccatatactcctgttgtggttacactatcgtacagagcacctgtccttttgctgggtgctaaagaatactcaactgcaattgacatgt

SEQ ID NO: 47588 - DNA, 282 bp, Glycine max
  Clone ID: 701037954H1
gtcgtttcaactcgcggcctctgaacctcttcgaaaccctcgttaaaacctaccgagactccgggtccgctcccttcgtcttcgatttgttgatcaaggcgtgtttggattccaaaaaacttgacccttctattgagatcgttcgaatcttgctctctcgcgggatcagccctaaagttagcaccttgaattctttgatttctagggtttgtaaaagtcgaggggtggatgaagggtatgcaatttaccgcgagttttttcggttggatgaggaaaacaacg

SEQ ID NO: 47589 - DNA, 284 bp, Glycine max
  Clone ID: 701037955H1
ttggcatggccattcaaatgtcttcttttgtctttgtttctcttacaattttattttgcttctcttccttggagaagagttttgcctttcaaacaacaaaggaggccacagaaagcaacaatcttcatcaatatactcatcttgttcacctcagctcactccttccttcatcttcctgcagctcttctgccaaaggtcccaaaagaaaagcatcattagaagtggtacacaaacatgggccatgctcccaactgaataatcatgatggcaaagcaaagtctaca

SEQ ID NO: 47590 - DNA, 285 bp, Glycine max
  Clone ID: 701037956H1
gagcgagcgagcgagcagtttcaaagagaggatttgggattgggaaggcgagggattgcgctgcgtctcttcctcttctctttcgattcatccctcattcataatcttccaatccaacaacctcagcctcacactcacacatacacacatctgaacgcgtatcgtccctcccatggcttcaaagcgcatcctcaaggagctcaaggacttgcagaaagacccaccaacttcttgcagcgctggtccagtagctgaggacatgttccattggcaagcaacgattat

SEQ ID NO: 47591 - DNA, 282 bp, Glycine max
  Clone ID: 701037957H1
tctcgacccgaaaacaaaggtcaagattaaccgtggtgttgccatctgtcacttggacacctccgattggagcccgacccatggagcattcatctcgttagggtcgggtccaggtcggattgaggtgtgccactggatcttcgagaatgacgtggcgtggaccattgtgaagtgagaaaagcgaacatcagaataaggaaggaagaagagttacctctataggaaactacagttaaattttttaaaaaaagcacttctgttctgctaagaaaatttagcagt

SEQ ID NO: 47592 - DNA, 283 bp, Glycine max
  Clone ID: 701037958H1
ctttttattttttccaatcaaaccaaacaaaacataagcaccgctcttttctctccgaaatccccatctcccttcacttctgagctctggacgagatcccagatctcaccatctttcacgcactcttccatcagattcaccctttcgtttaacgcaaactcataacttgaaggttaatggctgctccaccggcaagggctcgtgccgattacgattatctcataaagcttctcttgatcggtgacagcggtgttgggaaaagttgcctccttctgcgtttctc

SEQ ID NO: 47593 - DNA, 117 bp, Glycine max
  Clone ID: 701037959H1
ctcgagcgctcgagcggtgagaacaataggaaaacaaaagaccagctagctgattaagcaaatcatgttctcatttatacatttatgaaatgtttctcatcattttgaactactttt

SEQ ID NO: 47594 - DNA, 282 bp, Glycine max
  Clone ID: 701037960H1
caggactacttcaagaggctttttaactttaagaaggatagggatggctactggaaatggtttgctggcaccttggcctctggtggtgctgctggtgcttcatcccttttgtttgtttactctcttgactatgcccgtacccgtcttgccaatgatgctaaggctgcaaagaagggaggagagagacagttcaatggccttgttgatgtctacaggaagacattggcatctgatggtgttgctgggctctaccgtggtttcaacatctcatgtgttggaatc

SEQ ID NO: 47595 - DNA, 285 bp, Glycine max
  Clone ID: 701037961H1
ctagacactcatctcactcgcgccatcgtagggtttctccttttgtttcgcaacatggttgccgctaagaaaactacgaagacccatgagagcatcaacaacaggctcgctcttgtcatgaagagtggcaaattcaccctcggttacaagaccgttctcaaatctcttaggaactccaaagggaaattgattatcattgctaacaactgcccccctttgagaaagtcagagattgaatactatgctatgttggcaaaggttggagttcatcattacaatgggaac

SEQ ID NO: 47596 - DNA, 93 bp, Glycine max
  Clone ID: 701037962H1
ctttttacttcccctatggctcgtcactccttgctcttagccatcctcctcttcgccgccgtgggcaccgccgcgatggcggtggccgcgtcc

SEQ ID NO: 47597 - DNA, 289 bp, Glycine max
  Clone ID: 701037963H1
aagaaagagaaaatcatgtcaacagcagaagctcctccttctttccaagaagcagcgcgatgcgttgtctgcaattgcagtttcaacactttcagaagaaggcaccactgtcgatcctgtgggagaacattgtgtaatgaacattcatcaaatcaaatggctttaccacaatttggcctttactcaaatgtccgagtatgtgctgattgtttcaacaacttgcggtctgggaaggatgaaccacagccttcttcagacggagtaaacagtgtgacagatacaatttcta

SEQ ID NO: 47598 - DNA, 127 bp, Glycine max
  Clone ID: 701037965H1
tgctcgagccgaatcggctgagctttcgtttctcatcagagactaacacagtccaatttccaaaccgaatcgagtttaaatttgaatttcattttcaacttccctgtgatgccttacacggtccgag

SEQ ID NO: 47599 - DNA, 279 bp, Glycine max
  Clone ID: 701037967H1
catttctatatagctaaagaaagtgatactattaagcataattaatataatggggtacatgtgcattaagatttcgttttgtgtgatgtgtgtgctggggttggtgatcgtgggtgatgttgcctacgctcaagattcagcagaagactacgtgaatgcacacaatgcagcacgagcagaggtgggttctcaatcaccaagacaaacagtgattgttccaagtttggcttgggatgatacggttgctgcttatgcagagagctatgctaatcaacgcaa

SEQ ID NO: 47600 - DNA, 281 bp, Glycine max
  Clone ID: 701037968H1
taaaaatttcaagccttatctcatagcataagcagagccccaagttacacccacgttcagtgagtgacattcctccgtttcaaagttttccaaccgcattcccaatggatcctcaagctccggcgacgggcaccaccgttcggagcgccgcggaaccatctcaacctcagccaccaaaaccatcccctcctctccctctccctccaccttccacatcatcaacccctccacaccctcccccaatccctaaccctaaccctaaccctagcccaggcccaggc

SEQ ID NO: 47601 - DNA, 279 bp, Glycine max
  Clone ID: 701037969H1
ggcgcagaagaacctcctgaaattcgatcgcttcattcattcacgttttgctttcttcagattttcgtcaatattagagattctacgttcgcacgattatgaagatgatgctatagcagcagcagtagaattcgttattgcaaaagaagaagaaaatggacgatagaggtagctcattcgttgctgttaggagaattcctcaaggagaaacctgccatccaaattctggaggaatgcttgcagaggatacagagacgtatagatgttccatctgatagt

SEQ ID NO: 47602 - DNA, 287 bp, Glycine max
  Clone ID: 701037939H1
tcttcctttccattcctctctccagaagtcctagccctacaatctcaaagacaaacccatcattcaaagtcataaccgatacctaaaatcctcattccaatcaaaaccaaccccaccatgcccacaaaattaagtcatcaaattaaagcaccgatgatcctcaatttgatccttgtgcttatttgtgtcactactccaatcaaaggtgagacatcaaggaagcttgatgaggtcacaaacggtaatgagaagtgcacaccatgtgaaggtggttacaccccatcacc

SEQ ID NO: 47603 - DNA, 289 bp, Glycine max
  Clone ID: 701037910H1
ctccaatccattcccccttttgacttccccatatggctcgctactccttcctcttggccctcctcctcctcctcttcgccgccgtgtccagcgccgccgacgacatcctgatccgtcaggtggtgccggatgccgtcggcgaacggcggagaaggaggaggaccacctgctgaacgcggagaccacttcgcgagcttcaaggcgaagttcgggaagaagtacgcgaccaaggaggagcacgaccgtcgcttcggcgtcttcaagtccaacctccgcagagcgaggctgc

SEQ ID NO: 47604 - DNA, 290 bp, Glycine max
  Clone ID: 701037912H1
gccaggatcaataaggacaaagaaggagggggcaaagaggtggcctggtttggggtttagaatttaaccatatttttgttcattaatatatatattgaatgcacattctgtaacataggatatcttgtcatagggttgaatttgggagggagcttccctgtttcttgatatttgttcatgcatttgtttctcttggttaattgctttatcaattgtgttgtgatctttttagctgtaccacaaaattctatacctgtgtcctccgtttccggaaaatgttgaaagcaaat

SEQ ID NO: 47605 - DNA, 131 bp, Glycine max
  Clone ID: 701037913H1
ggaaacattggtagaagacattgaagagagagagagagagagagagagagagagagagagggttggattggttttcttcttccttctctctagagagactctaatctcaatcctcattacagatttcttca

SEQ ID NO: 47606 - DNA, 286 bp, Glycine max
  Clone ID: 701037914H1
cgaacaactacatagcatttatttttcgctcttctctcttctattcagccactgctcacaccatgagtgccgataagaagaaactgattggcagattacgcctatttttcactaatgcaaaaccatacctcttaatgattggcttgcaatttggcatggctggaaattacatcttcggcaaggatgttcttaaccatggcatgagtcgttttgtgttcattgtttaccgaaatgctatggccaccattgctcttgcccctatttgcttctttattgaaaggcaaag

SEQ ID NO: 47607 - DNA, 301 bp, Glycine max
  Clone ID: 701037915H1
aattgcaggcatgtctagcattgaacttaacgtaaagcagcaaggagaaccaacccgggttcagcctgcacaggaaacagaaaagggactctacttcctttcaaacctagaccagaacattgctgttccagtgcgcacggtttattgcttcaaatccggttctagaggaaacgaggatgctgcacaagttatcaaggaagccttgtcgaaaattcttgtcccttattaccccatggctggcacgttgatgataagcttggaagggaagttaatagtggataaccctggggagggtgcggtg

SEQ ID NO: 47608 - DNA, 301 bp, Glycine max
  Clone ID: 701037916H1
ccctaccattccaaagctcgaaggtgaacagtgagtgagtgagttattcagaacccaggatttggcgaaagtgaagcgatgagcagtgataggaatattggggttgccttggacttttccaaaggaagcaaaatcgctctcaaatgggctattgacaatcttctccgcaacggtgacatactctacatcgtccacatcaagccttccggcggaagtgaattccgaaatcttctctggtccaccactggttcacctctgattccgttgtcggagtttcgtgagaaggaggtgatgcatcact

SEQ ID NO: 47609 - DNA, 290 bp, Glycine max
  Clone ID: 701037918H1
cggaaatggttatgtgggttgtgctcagaagcggtgagagatgaagtgagccatggagggaagaaggcatcatcagctatggatgaagctgtgaaggctcacatgtcattctgccgcaagttcaaatccaaccctgcagttagagttgctgaagggatgagacagatgctaaggagaaggtctgacttgtcatcatcatcatcatcatcatctccatcttcatcaaagaagtacacaaggtcaaccagcacttctcaagtcggggattcttcaagtttccatttgtagta

SEQ ID NO: 47610 - DNA, 287 bp, Glycine max
  Clone ID: 701037919H1
gtgagagaagagatgatacaaatgcttaggattgcattgctttgcaccagtagaaacccagcggataggccttctatgagggatgttgtgttgatgctgcaagaggccaagccaaagaggaaattgcttgatagtgttattgtgggtcgatgtgctggggacaatgtggttggtggtggtgggggtgacattcctttgccacaaaagccaaccgcggatcaatgctaatgtgtttatatgattgacatgttttttcttcttcttcttcttcttttttatattttgga

SEQ ID NO: 47611 - DNA, 287 bp, Glycine max
  Clone ID: 701037920H1
gttataacttttccaatatatgttttcagtttaagtttggttacgtttgattgaataaacttaaaaaatattattaaggagaagtgaagtaagtttttcttcttaagttaaaagtaacttatacatgagataatttatagaaattcttatacaataacttatccaaaaatttgtttttaatttatacataagttaaatttattttgtggtaaaaatttagtttatttattttcgtatacaagtgtttatggaaaatttatccaaataaaaccaaaattgttttcttc

SEQ ID NO: 47612 - DNA, 287 bp, Glycine max
  Clone ID: 701037921H1
gcggcatatgaaacattgaatgaagtagtaaggtgttcaacagatgaaacagctactttggtggtacaactagtttctgtcatcatgatggagctgcacaaatgtcttgaagcacaaaatctttcatcggatgagagagaaaagcggagtgaattgataggccttctttgtgggtgcatgcaagtaattattcagaaactagggtctttggattctaccaaatatgtgttggtgcagtattctgatcagataatgagactattcttcagggtctttgcttgtagaaa

SEQ ID NO: 47613 - DNA, 288 bp, Glycine max
  Clone ID: 701037923H1
cacttctcttctgtgtttcttagcagaattaagatggctaccttgactgtacctccagttcctccttcccccagagatgatgccatgcagctttaccgtgcttttaagggatttgggtgtgatacaagtgctgttatcaatatacttgctcatcgagatgctacacagcgtgcctacatccagcaagaatacaaagcaatgtattctgaggaactttccaagcgcttagcttcggagcttagtggaaagttagagactgcagttctgctctggttgcatgaccctgca

SEQ ID NO: 47614 - DNA, 94 bp, Glycine max
  Clone ID: 701037924H1
cacacctccatgtgctgctcaagcttcttctgtgtcacttctacctgaagtttataactgctcctcaatgctaatctcgccttccccatttaga

SEQ ID NO: 47615 - DNA, 286 bp, Glycine max
  Clone ID: 701037926H1
gaaaacgcgtcttcataaacgccgcccaaaacttctcatacccttttattcattccattcctttctaagggttttcttttctttgccgagaaaatgagagagtgcatttcgatccacattggccaggccggtatccaggttggaaacgcctgctgggaactctattgccttgaacacggcattcagcccgatggacagatgccgagtgacaagaccgttggcggaggagacgacgccttcaacacatttttcagcgagaccggcgccggacagcacgtgccccgcg

SEQ ID NO: 47616 - DNA, 290 bp, Glycine max
  Clone ID: 701037927H1
cattttccgagaggccaaaatatccattgcacctttctctttctccgatggctaatccctcactcttgttcttcagtctcctcctattatccgccaccgtagccgccgccgaacggatcgacgatgaagacgaccttctgatccgtcaagtggtgccggatgcggaggaccaccacctgctcaacgcggagctccacttctccgccttcaagacaaagttcggcaagacctacgccacgcaggaggagcacgaccaccgcttccgtatcttcaagaacaacttgctccgc

SEQ ID NO: 47617 - DNA, 287 bp, Glycine max
  Clone ID: 701037928H1
caaagtctcagatcgagcaagtggtgggttcttccacttctgttcgcttctctggctatgcttgtagatattttggcttcctaatttcacggaaaaagtatgttgtctgcattgatgatgattgtgttcctgcaaaagataattcagggattttggtggatgctgtggctcagcatattgtgaacctgcagactcctgccacccccttcttctttaatacactgtatgatccattctgtaagggtgcagattttgttcgtgggtacccattcagcctgcgaagtggg

SEQ ID NO: 47618 - DNA, 293 bp, Glycine max
  Clone ID: 701037929H1
cgctaacactcattaattgcaagaatggcacttcgttgcttggtgatgtccctttctgttctcttcactcttggtcttgcgagagaaagccatgccagagacgaagatttttggcatgctgtttggccaaacactcccattccaagttcattgcgagatcttctaaagcctggccctgcaagtgttgaaatcgatgatcaccctatgcaaattgaagaaacacagtacccgaaaaccttcttctataaagaagaccttcatccaggcaaaacaatgaaagtacaattcagcaa

SEQ ID NO: 47619 - DNA, 292 bp, Glycine max
  Clone ID: 701037930H1
cgatggtgaaaatctcacttggtggatacgatgatggggaaggacccagcaaccgaacccataagcgacgcagggaagatgatgatgacgacgacgaagaagagcaacaacaacaacgaagctttgagatggtggacccttcaataggaactcaagagaacgaagatcatgctgctccatccaatgatggatcgaattctaacggaaatggggctggaaccagtacccgggataggtccgttcctatcttcgtttccgaccctgatgtccttgattgctgcatttgctatga

SEQ ID NO: 47620 - DNA, 293 bp, Glycine max
  Clone ID: 701037933H1
ggagaacagggtaatattacaggaatggtttgaccgcgttgactcggagaaaagtggaagcataacagcggtacagctgaagactgctcttgctgtgggcaacctggaatttccgctctcagttgttcagcaaatgatcaggatgtacgatttcgacaggaatggtactatgagctttcaagaatttgttgcactcaacaacttccttcttaaggttcaacatgcattttctgatctagagaggggtcgtggttttcttgtacctgatgatgtatttgaggctttgggaaaaa

SEQ ID NO: 47621 - DNA, 284 bp, Glycine max
  Clone ID: 701037934H1
cattactactgaaacttaatctcaaagaaagaagctgctgagatgaataagaggtctttcaagtatgcctgggtgcttgacaagctcaaggctgagcgtgaaagaggaatcaccattgatattgctctgtggaagtttgagaccacaaagtactactgcacagtcattgatgcccctggacatagggatttcatcaagaacatgatcactggaacatctcaagctgactgtgctgttcttattattgattccaccactggtggttttgaagctggtatttccaa

SEQ ID NO: 47622 - DNA, 86 bp, Glycine max
  Clone ID: 701037935H1
cagggttagaacaggaagagaaatgaccaggacaggttagacgtctattttatgtcttgggtcttcaattatcatgttagtagtat

SEQ ID NO: 47623 - DNA, 280 bp, Glycine max
  Clone ID: 701037937H1
cttcgtctcaaacttcttcgttccttcgattcattccatttcctccaaaatggccaaagacccagttcgcgttctcgtcactggagccgcaggcaaattggatatgctcttgtccctatgattgctaggggagtgatgctgggtcctgaccagcccgtgatcctccacatgcttgacattcctccagcagcagagtcgttgaatggggttaaaatggaattggtggatgctgcattccctcttcttaaaggtgttgttgctacaaccgatgtggttgagg

SEQ ID NO: 47624 - DNA, 285 bp, Glycine max
  Clone ID: 701037938H1
ggcacgcattctatcgctgtttctctcgaatcaacaaaacgccaccgtttcattgatctacttcctccaaggccaggtctccaagaattggtaccaattcaagctgcaaatatacttgaacttcaacttatcccacattctccactctcaatggcttcaactctcaaatctggcggaattcatacaggggcaatcaatgatgatttatacaaggaattgtggcatgcatgtgctggtccccttgtcactctccctcgtgaaggggaacgagtctattactttcca

SEQ ID NO: 47625 - DNA, 292 bp, Glycine max
  Clone ID: 701037909H1
caccaacataatttgtttttctcttctagcttccactatgtctaaaacgcatgtgagaagacatgctcttgagaagtgcaggagtgtgaaagagacacagaaagtattgaaccacaactttttcaccagaaacctcaagaaagtgtaccctattgggcttcagaaaagcacctcatctttgtctctgtcttcaatttcattgtctttgtcacaaaactcaaatgactcttcacaggctgattctttgactccactggatgaaaagatttcgctggcactgcgtttgatatcg

SEQ ID NO: 47626 - DNA, 267 bp, Glycine max
  Clone ID: 701037868H1
agacattggttcaaggctgtgtctccaatggggttaggtttcacaaggcaaaggtgtggcaagttcagcaccaagagtttgagtccaaagttttgtgtgatgatggggtggaattgaaggggagtttggttgttgatgctagtggattcgcaagtaattttgtagcatatgacaaggtgagacaccatggttttcagattgctcatggtgttttggctgacgtggatgatcacccttttgatttggacaagatggttttaatggact

SEQ ID NO: 47627 - DNA, 267 bp, Glycine max
  Clone ID: 701037869H1
gcaggtttggcaggcacaccccttctggtccagattcgtggagcatgatgattatggcaatggtgttgagatgggaaagggagctattaaagaagtgtagttagtcctcgtcttggtttatttttctcaatgactagcgttttagcttttgttggtaaatcatactattggtttcaatgtattgaattgttcctaaaaattaaaaagggttatttttcttatgtatcccctgcttcttcatatgaagcaagtttacaggatactttt

SEQ ID NO: 47628 - DNA, 266 bp, Glycine max
  Clone ID: 701037872H1
cacaaagtgagcttgaaaagattaaacgtaacctgaggaaagttcataacccagttgttgagaatgctgttccgtcagaagttgaatcggagacgccaaaggatcatttggaaaaggcaacagttacctcatgccttgctgtttcagaacaagaggtcattagttctaatgagaagatcaagaaggaagcaacattaattgtttctagtgtgccagatatagaaactactccaagactttcagttagtaaggaggtgttagactca

SEQ ID NO: 47629 - DNA, 262 bp, Glycine max
  Clone ID: 701037873H1
gttcaaaacaaggtttccatcaactggctactcgaccaaggtcccagcttaggtattgtccgagtgcatggggttgggcttttacacaccgagctagtgtctggaatccctgtaattttcttccagtttgtagccaacctcccagccttccatcaggtcctagttttcctatgcatcaaacatgtgccggttccacatgttaaagctaaggaacggtttctagttggtcgtattggtccaaaagagttcagaatctaccggt

SEQ ID NO: 47630 - DNA, 262 bp, Glycine max
  Clone ID: 701037874H1
agatggctttaggtgttcctgctcttccgttgacatacgtggctcacgttctggcagttgttgccagcgtcttggtcgtggtctgggtcgtcaatttcaggggtggcttggcttgggattctgataacaagtccctcatcttcaacattcatccagttcttattgttattggcttactagttcatgggggtgaagctattataagttacaaagcttttcccctaaagaaggaagtgaagaaattgatacaccttgttttcca

SEQ ID NO: 47631 - DNA, 263 bp, Glycine max
  Clone ID: 701037875H1
aagctctcaaggattgaccttgagtgggtccatgtcctcagcgaaggatgggccacacccctgaaaggcttcatgagagaagccgagttcctccaaacgcttcatttcaactcgctccgactcgatgatgggtcggtcgtgaacatgtcagtgcccatcgtgctggctattgatgatgcgcagaagcatcggatcggggataacaaaaaggttgctctttttgattccaagggagaccccgttgcaattctcaataatattga

SEQ ID NO: 47632 - DNA, 265 bp, Glycine max
  Clone ID: 701037878H1
caaaccgtggagcttcagttagggttgggagggacacagagaaagcagggaagggatattttgaggacagaaggccagcttctaacatggacccatatgtggttacttccatgattgcagacacaaccattctgtggaagccatgagcaaaacttgcatgttgtctccctttggatggaacaaggaacaaggaacaaggaacaaggaacagttatgcttttctaagtagggtttggtcctttttattttttaccttttgattttt

SEQ ID NO: 47633 - DNA, 269 bp, Glycine max
  Clone ID: 701037879H1
cagctccaaacactcgtttcaggcattcttgccttgttagtaggtgccttgctttataagtcaaagacaacacatggtcctaatgcaaagatctgcactgcgccacaagcaggaggagcatggcctattgttggtcatttgcacctcttcggggctcatcaacttacacacaaaacactaggcacgatggctgacaaacatgggccaattttcacgataaaacttggttcatacaaagttctggtgttgagtagctgggagatggccga

SEQ ID NO: 47634 - DNA, 277 bp, Glycine max
  Clone ID: 701037880H1
cttctttttactctctctctgtctctctctacgctttctcgttcacagatccctcaagggatccactaactgaaggagaaatggggttgacattcaccaagcttttcagccggcttttcgccaagaaggaaatgcgaattctgatggtgggtctcgatgcagctggtaagaccaccatcctgtacaagctcaaacttggagagatcgttaccacaattcccaccattgggttcaatgtggagactgtggaatacaagaacattagtttcactgtctg

SEQ ID NO: 47635 - DNA, 265 bp, Glycine max
  Clone ID: 701037883H1
ccttgctcttgttctctgattggcctagccagtagtagccaatttgttggagctggttgggaatggcgtcgaaaccgaaatcaaatggaaattccaaatgcaacaaaggatacgctgacagctatatgctgttgaatcctgaagacgctcatttcttcgatcttgttcatgtgctgtattcccgtaacttgggaaaccgaaaatttgtggacagcaatgctgagggatcttatgagggaagcttccgccaaagatggcttatatt

SEQ ID NO: 47636 - DNA, 268 bp, Glycine max
  Clone ID: 701037884H1
cagaactgaatattaatcttatatattcctcaacaatttcagcatcagaattttatcaaaatggaaggacaaacaagtgattcattaagtaaacaacaatgtttggagacaacattaaccaacgagcttcaaaatgtggaacctccagaaatgtatggattcgatatgcaatgcatttatagagtaccaccagccattcgtgaaaataatcccaaagcctacacacctcaaatggtttcaattggcccttttcacaaagcacgtgacg

SEQ ID NO: 47637 - DNA, 98 bp, Glycine max
  Clone ID: 701037885H1
ctctaacaccacacctctgcctctggctcaagcaccttgcacagttaccactgaaacaacaacaccataataccgaaaactatacccggcaagaagaa

SEQ ID NO: 47638 - DNA, 265 bp, Glycine max
  Clone ID: 701037886H1
ggccttggagttaaaagccgatcttcttgtttccttgagtgatgtagaaggtctttataacggacctccaagtgcccacccattaaagcttattcatacgtatattaaggagaagcatcagaatgaaattacttttggtgacgaatctagagtgggaagaggtggaatgactgtcaaagtaaaagctgctgttcatgcagctgatgccggcattcctgttgttattaccagtggttttgcagctgagaatattatcaatgttctc

SEQ ID NO: 47639 - DNA, 261 bp, Glycine max
  Clone ID: 701037887H1
aaacaatttgcccaattgtttgagatgttcaatatgagatttgtatctcaagattgggtggtttcatgtgcactaatacttctggtgtcatgcacaacatactcatcagcttctttggggaaacctgagaacaacataaaaacatctgtttttaaatcacccaagattgagctaggtccagggttagtttcaaacaaattttattttgatgttgactttccaagaggccatattgcactcaagagtttcaatgctgaattg

SEQ ID NO: 47640 - DNA, 266 bp, Glycine max
  Clone ID: 701037888H1
cagccttgtctacactgcatgaaaatcagaccatagatgatgaaactttggcagaaccaatggatgttgatgatgcggacaatcgaagtagctggagaagtccacgtgaacagcttcaacattggcagatgaacaggaggaagttggcattttcaacagtggggacaccagactacattgctcctgaagtacttttgaaaaaaggatatgggatggaatgtgattggtggtcactgggagcaataatgtatgacatgctggttggt

SEQ ID NO: 47641 - DNA, 257 bp, Glycine max
  Clone ID: 701037889H1
ctcagaattctctaaaagagatctttttctgctctttgaagaaagaagggtctttgcttgattttggagatgtctctgctctcagatctcatcaaccttaacctctccgataccaccgagaaggtgatcgcagagtacatatggatcggtggatcaggaatggacctgaggagcaaagcaaggactctcccaggaccagttagcgacccttcagagcttcccaagtggaactatgatggttccagcacaggtcaagc

SEQ ID NO: 47642 - DNA, 264 bp, Glycine max
  Clone ID: 701037891H1
atcaagagcaaaagaagaggcttctagcaggaaggctatcatggagaaagtggagaagtggatgctagcatgtgatgaggagcactggctagaagaatatagcagggatgagaatcgatactcagtcagtagaggagctcacaaaaacttgagacgtgccgaacgtgcccgtataatggtcagcagaatgccagctttggtagatttgctaataaaaatgactaggagttgggaagaagacagaaataaagttttcttgtatga

SEQ ID NO: 47643 - DNA, 262 bp, Glycine max
  Clone ID: 701037892H1
accgcggcggcggctgccgcctcctccgacgagatcaggaccgtctggctcggcgacctccaccattggatggacgagacctacctccacaactgctttgctcacaccggcgaggttgtgtcggccaaggtcattcgaaataagcaaactggtcagtctgagggatatggattcgtggagttctattcacgagcgacggctgagaaagtcttgcagaactataatggcacgatgatgcccaatacagatcaggcattccgtc

SEQ ID NO: 47644 - DNA, 267 bp, Glycine max
  Clone ID: 701037893H1
cctagctagtagtctcagttcgtttgagagagaaaaaatggcagagggtctcgttctccgcggaaccatgcgcgcccacaccgacgtcgtgacggcgattgccactcccatcgacaactccgacatgatcgtgacggcgtcgcgcgacaaatccatcattctctggcacctcaccaaggaggacaagacctacggtgtcccccgccgccgcctcaccggacattctcacttcgtccaggacgtcgtcctctcatccgacggtcagtt

SEQ ID NO: 47645 - DNA, 82 bp, Glycine max
  Clone ID: 701037894H1
ctctcccatcctttcgcattctcaatacccttgcgctttgtgaaaggaaagcaaacatggttgaacaggtccaacaccctac

SEQ ID NO: 47646 - DNA, 135 bp, Glycine max
  Clone ID: 701037901H1
gctatgactagatattgcaggtttttgctctttggttttgaggaggatgagcttggttttgagaggggaagtcacaagaagcctaagaggaggttgattactcaggacatagctgaaacgtttttgactgttcct

SEQ ID NO: 47647 - DNA, 95 bp, Glycine max
  Clone ID: 701037904H1
ctttttctcactgtctctctctctcggtctcgctcttcgtctcatcaaggacagagttacagactcagcggtcttgcgattctctttcgtcttgg

SEQ ID NO: 47648 - DNA, 287 bp, Glycine max
  Clone ID: 701037905H1
ctttcaaatcccttcttctttctctcccaaatctcaatcttcataacattcacccatttcttcacattgggggcttccggttctatttgttgattttgatgctcgagttctgtggtttctaaagcattgaaatggggaaagggagaagtcctgggaaatggttcaagaatttactcttggggaagaaatcgtcttcaaagtctacttcatcaaagaagaatgacatttttaaaccttcaattgacaaggatttgctggtgtcgtctgaggtacccgtgcctgatcca

SEQ ID NO: 47649 - DNA, 286 bp, Glycine max
  Clone ID: 701037906H1
caaaccaaggacgagaacacgatgttgcttgaacttgcacttggtttattggttttggctctgtttctgcacttgcgtcccacacccactgcaaaacccaaagcacttcgccatctcccaaacccaccaagcccaaagcctcgtcttcccttcataggacaccttcatctcttaaaagacaaacttctccactacgcactcatcgccctctccaaaaaacatggtcccctattctctctctactttggctccatgccaaccgttgttgcctccacaccagaattgt

SEQ ID NO: 47650 - DNA, 270 bp, Glycine max
  Clone ID: 701037867H1
cgagggcaagctctcacctttgaagccccaattttgaagagatataactggcctgacagaaactgagaggatgaaacgtaataatagtgtttatcccgctgcacttaactgtgatgacatcctgcatgagatcctacttcgaataccaccaccaactatctccaaattaattatcgtatcacaaatatggctgcgtgtgatatgcagtccttcatttcgtcaatgctacgtgaggcaatggggacaaagttttcgacttttgggtttttt

SEQ ID NO: 47651 - DNA, 284 bp, Glycine max
  Clone ID: 701037907H1
ctcaattacaggaattcgtagagatcgaaaatatgcagtgcaaccacggagtttgtatgcaacaggggtgcacatgtcaatggatctatcaggaaagacaacacacaaaactgaaggtaggatcaaatacttccactatcatggaaccatctcagacaggagagaaacatgtaaaatactcgtcaacacaacacaagtcacacagaacaaaattccttatgtgatggacaccacaatgagggacactgctggggtaatcaagacatttgagctcaagatgattg

SEQ ID NO: 47652 - DNA, 270 bp, Glycine max
  Clone ID: 701037839H1
gaaaaaccctaagcaaagcaaagcggtaaggatggggaacacggagaagctgatgaaccagatcatggaattgaaattcacttcgaaatcgctgcagcgtcaatcgcgtaagtgcgagaaggaggagaaatcggagaagctgaaggtgaagaaggcgatcgagaaaggcaacatggacggcgctcgaatctacgcggagaacgcgatccgtaagcgcacggagcagatgaactacctccgcctggcctcgcgcctcgacgccgtggtcgc

SEQ ID NO: 47653 - DNA, 268 bp, Glycine max
  Clone ID: 701037841H1
cagattcccaaacttttttactttttattccctttttctcactatacaatacaaatacacattcaacaattttcgattcaagttcaaagccatcgacgagtgttgaggaagaataacaatgggaatgatagtggattttgaaaatgaccaaaacgacgccgttctggttccgccccctaacttcgccatggttgaagactgcgttttccgatccagcttccccaccccttccaatttcccctttctccaaaccctaaaccttcgctcc

SEQ ID NO: 47654 - DNA, 267 bp, Glycine max
  Clone ID: 701037842H1
agaaaagttagggttcacaacttttccttttccttttgcttgcgaatctgaatcaaataatcaatcatccattcattattcatcatactcgtcggcgaagaaaatcacgctgaagagttcggacggcgaggctttcgaggtggaggaggcggtggcgctggagtcgcagacgataaagcacatgatcgaggacgactgcgccgacagcggcatccctctgccgaacgtgacgagcaagatcctggcgaaggttatcgagtactgcaa

SEQ ID NO: 47655 - DNA, 266 bp, Glycine max
  Clone ID: 701037843H1
gcgaaatcatttaagataagagtgcattactactaagaggagaaaaaatgaaagttgtatacttccttgttgctatcttggctttgacatccactgtggtctctgcctatgaccctagtcctctgcaagatttttgtgtggcggccaaagaaaaagatggtgtatttgtgaatggaaaattctgcaaagatcccaagcttgtgaaagctgaagatttcttcaaacatgtggaacctgcgaatactgcgaatccactaggttcacaa

SEQ ID NO: 47656 - DNA, 267 bp, Glycine max
  Clone ID: 701037844H1
gcaagctagctaggttgaaaatagtttggttttgtagtaagtgaggtgaggtgccaaaatggtgaagataactcttggtactttcgatgactcttttggtgttgcctctcttaaggcttatttggcagagttccatgcaactctgattttcgtgttcgctggtgttggttcagccatcgcttacaacgagcttacaaaagatgcagccttggatccaacggcgctggtggcagtagctgtggcccatgcatttgcactgtttgtagg

SEQ ID NO: 47657 - DNA, 270 bp, Glycine max
  Clone ID: 701037845H1
ggagaaagtgttggctcacaaaccctccaatttaagctttattgaagcagctagccttcctgcagccatcatcactgcttatcaaggatttgataaaattgagttttctgctggcaaatctatacttgttctaggaggtgctggtggagttggatcccttgttattcagctcgccaagcacgtttttggcgcatctaaggttgcagccactgctagtactccgaaacaggatttgttgaggagcttaggagcagacttggctattgatta

SEQ ID NO: 47658 - DNA, 274 bp, Glycine max
  Clone ID: 701037846H1
cacacacacacacaaattctcaaacccaaatcccaagtctcctaaaaccctaattcgcagtgaaaatgagagaaatcttgcacatccagggagggcaatgcggtaaccagatcggagcgaagttctgggaggtgatatgcgacgaccacggcatcgaccacaccggaaagtacagcggcgactccgagctccaattggagcgcatcaatgtttattacaatgaagccagcggcggaaggtacgttccacgcgccgtcctcatggatctggagcc

SEQ ID NO: 47659 - DNA, 278 bp, Glycine max
  Clone ID: 701037847H1
tctaactcgctaccctattccgctttctctcatccatcatgaaaaccggaaagtccaagaccgaatctaagacagccgatgccaaacttgctgtgaataagaagggcgccgccaccaagactaggaaacccgccggaaaggggaaggcagcgaaagatcctaacaagccaaagaggcctccaagtgctttcttcgttttcatggaggaattcaggaaggtgttcaacaaggaacatcccgacaacaaagcagtgtctgctgtgggcaaagctgctgga

SEQ ID NO: 47660 - DNA, 279 bp, Glycine max
  Clone ID: 701037848H1
gttagctaagaagaaaataggagagggttagtttttaggggctgcggaaaaaagatagtgagtggtggccaatgggagcggagaggttttcccacgaccatgctcccttgattctgggtctccagccatccgccctggtcgacaacgttgccaccgtcgattggtccttgctccatcgcattcccggcgagcgcggtggctccatccctgtccaaattgaagaactggaatccatactgagagaggttaaatccaaatcccacgatgacatcaaaactc

SEQ ID NO: 47661 - DNA, 278 bp, Glycine max
  Clone ID: 701037849H1
ctgcactttcaaattgctgagaggaacatactggaggagatgatcaaaatcgtaaggcagaaggcagatatgcaagtcagggataaaattttgatactcctggactcttggcaagacgcatttgggggaccaggtggtaaacatcctcagtactattgggcatatgaggagttaaagcgatctggagtagttttcccaaagcgttcaccagatgcagctccaatatttactcctcctcctacccatccaaatttaagaaatatgcaagctggatatgg

SEQ ID NO: 47662 - DNA, 278 bp, Glycine max
  Clone ID: 701037850H1
cccacaagcccctgggcctgcacccacgcaaccaccatcaacaaccccatcaccgtccacgtcagcacccgccccatcaccaaccgcaaacacccctcctcctgcggctgcacctgcacccgcaacacccacacccacacccgctccttcatctccaactccaacaacagctccatcccaggccccaggcccaaccacctcctcccctcccgcgccaggcccatcaggcccagcaccaggcccatcaggcccggctccagaccaaccagcctccgagc

SEQ ID NO: 47663 - DNA, 271 bp, Glycine max
  Clone ID: 701037852H1
attttcccaaccaaacctccatagaggaaaaaaaatccagactctaggccttcatggatagagaacaagaagagatgcaatttcttgggttctttggcatctacaaagaagcctccaagatcatactttcatggaggagaatcttcacccaaatcacctcaacactaatcctccctctctccttcatcttcctcatccacatggaaatctccaacctcctcttcaggaagattctcatcaacgaaatagtcatggacgaaacaaagcctaa

SEQ ID NO: 47664 - DNA, 271 bp, Glycine max
  Clone ID: 701037853H1
tcgcagccattttctttgacactctccaaacatgttcgccacctttcgactccttcttcttctctcattcctctcactactcaccaccgcccaatccgaagaccagcgtcaaatccttctgaacctaaaatccaccctccacaattcaaattccaaactcttccactcatggaacgccaccaattccgtttgcaccttcctcggagtcacttgcaactccctcaattccgtcacggaaataaacctctccaaccaaactctctccggtgtt

SEQ ID NO: 47665 - DNA, 270 bp, Glycine max
  Clone ID: 701037854H1
tgcaatcaaattagttcattctctttgcgcagttccctcacctctcctttcaagatgcagatcttcgtcaagaccctcaccggaaagaccatcacccttgaggtggaaagctctgacaccatcgacaacgtcaaggccaagatccaggacaaggaaggaattcccccggatcagcaacgtctcatcttcgccggaaagcagctcgaggacggccgtaccctcgccgactacaacatccagaaggagtcaacccttcaccttgtccttcgt

SEQ ID NO: 47666 - DNA, 268 bp, Glycine max
  Clone ID: 701037856H1
ggtcaaccgcgtagacacttgctgcaaagtggttggagtgtttttgttagctccaagaggctagttgctggggatgcgtttatatttttaaggggtgagaatggggaacttcgagttggtgttaggcgtgcaatgagacaacagggtaatgttccatcatcggttatctcaagccacagtatgcatctcggtgttcttgcaactgcttggcatgccatattgactgggaccatgttcactgtgtattacaagcctaggactagtccag

SEQ ID NO: 47667 - DNA, 265 bp, Glycine max
  Clone ID: 701037859H1
ctcgagccgttcggcgcaatcggcttctgcttcaaggaaggagaccttgttattctctaaccacaagtaaaatgtcaggtgaagagggtgtcattgcagttgagccagctgctgctgctgctgccatcccaggcgagccaatggatatcatgactgccttacaacttgtgctcagaaaatctctggcttatggtggtttgtcgcgtggccttcatgaaggtgcaaaagtgattgagaagcatgctgcacaactctgtgttcttgc

SEQ ID NO: 47668 - DNA, 265 bp, Glycine max
  Clone ID: 701037860H1
gtcactccttgctcttagccctcctcctcttcgccgccgtcgccaccgccgcgatggggtggcgcgtccgacgccgacgacatcctgatccgtcaggtggtgccagatgttggcgaagcgaagaggaggacaacctgctgaaagccgagcaccaatccgcgagcttcaaggccaagttcgccaagacctacgccaccaaggaggagcacgatcatcgcttcggcgtcttcaagtccaacctccgcagagccaggctgcacgccaa

SEQ ID NO: 47669 - DNA, 268 bp, Glycine max
  Clone ID: 701037861H1
ctctctttctctttctctccgacctagcgagaccgagcgatccgctcctaaccccgcgatgctccgccgcgcaaccacctccctcatctccggcgcctcccgccgccgcctctccaccgacgtgccggcgacgccggggcggattccgtcttcgcggaggcgtggaagaaagtgagccccaacatcgacccgccgaagacgccgctggcgtacatgaagccccgaccacccactccttcgactctcccctccaaactcaccgtcaact

SEQ ID NO: 47670 - DNA, 266 bp, Glycine max
  Clone ID: 701037862H1
cttcaccttgtcctccgtctccgtggggggttttaagctcgttgtgtaatgttggatgtgttcccaaaacatttgaagaactttgatgtttaatgggtctgtaataatgtcccttgaaaataagttcggtttgtgttgaactcaattgtgtcccattaataatagtactctaatatcccacctacgtttgttatgaatgtgtgaaatatgaaatgattaattgtcaaaaaaaaaaaaaaaaaaaagggggggccgccgattattga

SEQ ID NO: 47671 - DNA, 274 bp, Glycine max
  Clone ID: 701037863H1
cctcgagccgaatcggctcgagtgaagtctttccatctcacagtgaccagctttgtgctgtacagtggttgtgcttggactgcttccactctccctagatgcacaactagatccctccttttacagagacacttgtcccagggttcactccattgttcgtgaagtcgtcaggaacgtttcaaagaaagatccccgtatgcttgctagtctcattagacttcactttcatgactgctttgttcaaggatgtgatgcatcagttttgttgaacaac

SEQ ID NO: 47672 - DNA, 111 bp, Glycine max
  Clone ID: 701037864H1
cgctgtagctatatgcgcaaatctaggagaacataggattgtgtttggtagttgggtttaatagttcacactaatcttttagatgagtgaagagaacacaagagcattaag

SEQ ID NO: 47673 - DNA, 228 bp, Glycine max
  Clone ID: 701037865H1
cccgatgccagaagtactatgaagccggtgcccgttttgccaaatggcgtgctgtgctcaagatcggcccaaacgaaccatccgagctggctatccatgaaaatgcctacggtcttgcccgatatgccgtcatatgccaggagaatggtctggtacctattgtagagccagagatcctggtggatggacctcatgacatcaacaagtgtgctgaggtgaccgagcgcg

SEQ ID NO: 47674 - DNA, 273 bp, Glycine max
  Clone ID: 701037866H1
aatggctgttaggcttgatgatgctcaccaagaactttcaaatgctattgtggttgctcaagacacatccaaccagatgtccaggcgtgatcctctgagatgttacatggatgtaattgatgatatgctaactcaaatgggaagatccatccttcaaaccacaaggtggccgattaggagaaagcgacattgattatgatactgacgagaagtcaatggcaacactaagacgtcatcttcgaggagctactgaggagtactacaggtataaaa

SEQ ID NO: 47675 - DNA, 271 bp, Glycine max
  Clone ID: 701037838H1
gcccaatccgtcacgaaaagtctagaccctgtcgtgtaacataaaaaccaccgaagaaaacatcactgcgccgcgctgccacaccgaacaaacacaaacatggatgactccaaactcaatcaattgaagcatttcatcgaacagtgcaagtccaacccttccctcctctccgatccttcactctccttcttccgcgactatctcgaaagtctcggggcgaaactccctgaatctgcttattccgaatcgacgggcgtggagagcgatgagg

SEQ ID NO: 47676 - DNA, 279 bp, Glycine max
  Clone ID: 701037815H1
ataaaacttctctcttcactttcttccacttcatcacaattctgccaaccaaagacacacaaaatcaatcaaggctttgaactatggccactcttcagagttggagaaaagcctacggtgccatcaaagacactaccaaagtcggtctcgctcatgtcaacagcgacttcgcggtatctcaattctcaatcttattcgtattcacggattcgttttcatatgtgttccgaaatatttctcgtgcgagtgatcggtttctcgcgtggattataatattat

SEQ ID NO: 47677 - DNA, 281 bp, Glycine max
  Clone ID: 701037816H1
atcacaatgagaataaacttactgtagtaaagatgagaatgcttctgtggaagagtaaacatactatacaaatggattctagccttaccactaaaggggaagggagactgggaaacactgtaggcaaaagcattaagaatgctttagaggtggttgtcgctttgtctactgacaagattcacaaatcacaatggaacactatagtatcatttgattcatgtaaacaatccacctccacctagtggggaaaagtttggctgttgtctaccattacccgtatg

SEQ ID NO: 47678 - DNA, 295 bp, Glycine max
  Clone ID: 701037817H1
gcacgaatatctcgttgtttggagcgatccgagaaaaactctgtaaacatgttggtttaccaggacctccttacaggtgatgagcttctctctgactccttccgttacaaggaaattgagaatggaatgctgtgggaagttgaggcgaagtgggttgttaaaggagcagttgatgtagacattggtgcaaacccttctgctgagggtggaggagaagatgagggagttgatgatgcagctgttaaggttgttgacattgttgacacattcagacttcaggagcaacccgcattcg

SEQ ID NO: 47679 - DNA, 275 bp, Glycine max
  Clone ID: 701037818H1
caattggaaagcatctgcaatccaatcattgccaagatgtaccaaggtggtgctggtccagacgtgggtggtgctggtgcagcagacgatgagtatgctgctcctccttctggtggaagtggtgctggccccaagattgaggaagtggactaaatgtagttgctttcctccagatacctgttttaaaaacttattttactttatgcttttttaattggattttaatcgcatgatttttcttggatgggattcaaactatttttcccttctgatat

SEQ ID NO: 47680 - DNA, 262 bp, Glycine max
  Clone ID: 701037819H1
tatatatatataatttgagcgtattgaagtttccagaaggataaggatctggtgaatttaagtgtagttttgtggtatcaagttttgatcattagcaacttgtatgttgagttgtctcattatgttcgatcgtatgtgattgtgcgactcgaggagttagaatctttgtattttcctgttaaatatctacaatatatcatataatattttaattgtcttgaattttttagaaacggaggcaagtgactgaataaaagggggg

SEQ ID NO: 47681 - DNA, 271 bp, Glycine max
  Clone ID: 701037820H1
cgaatgagagcatcaaactcttcttcttcgatttccattgcgaacgttactttttcttcttctttctcttcattttcttcgctcttcgatcttcgtccggggactgctccgaataccaccaccaccactcgccgatggccacgatcggaggcttacacgactcccaaggctctcaaaacagcgtcgaaaccgaagcccttgctcgattcgccgtagacgaacacaacaagaagcagaattcgcttctggagtttgctagggtggttagggc

SEQ ID NO: 47682 - DNA, 271 bp, Glycine max
  Clone ID: 701037821H1
agcggcttcttcttccgttttcctgaatcggtgtgaacaatggcgacgtacgctgcgatgaaacccaccaagccagggttggaggagtcccaggaacagatccataagataaggatcaccctttcttccaagcacgtcaaaaacctcgagaaggtttgtgcggacttggttcgtggtgcaaaggacaagcgcctcagggttaagggacctgttaggatgcccactaaggttcttcacatcactaccaggaagtccccctgtggtgaaggta

SEQ ID NO: 47683 - DNA, 270 bp, Glycine max
  Clone ID: 701037822H1
gtttgtttgtgtcaaacaccataaaccattgtatcttttttctttgttctttgtctaggtcttggcactgaacattattttccatcaaaaataaaaattcagagcagaataacaacaattcaggaaaacaaaaaaactcagccacataatttccttcaactcatggcttgtactgagcatggccatggctctgtgttgttgggtttggtgttgttgagtttagctgcttcacaaagttgttgttatggtttgagcacatttgggtttgac

SEQ ID NO: 47684 - DNA, 272 bp, Glycine max
  Clone ID: 701037823H1
ttcctgcaagcggtgactcttgctttggtgttagccaccgtctctgcatcagatcctgatcctcttcaagacctctgtgtcgcagaccttgcttcagcggttaaagtgaatggattcacatgcaaagatgctgccaaggtaaatgcgagtgatttcttctcagacatactagccaaaccaggtgccacaaacaacacctatggctccctagtgactggagccaacgttcagaacatcccaggactcaacacccttggcgtgtctttatcacg

SEQ ID NO: 47685 - DNA, 268 bp, Glycine max
  unsure (1)..(268): unsure at all n locations
  Clone ID: 701037824H1
cttaacaacagcacaaagcgggttactgtctgttcaagctaccatctctctctctctttcttagtgcctccttgccagaagttaaaatggcncaagaaactttcctattcacatctgaatcagtgaacgaggggcaccctgacaagctctgtgaccagatctccgatgctgtgctcgatgcatgcttggagcaggaccctgacagcaaggttgcctgtgaaacctgcaccaagaccaacatggtgatggttttcggagagatcacaac

SEQ ID NO: 47686 - DNA, 270 bp, Glycine max
  Clone ID: 701037825H1
aaaaaaccacaatggttgaatctcagcccaagttcttcatccccgactcgatcaatggagtgaatttcgacgtggcggcgcagattaagatggtgtgggaagtgatcaaggcgccattgatcgtgccactgctgaacctcgcagtgtacatttccctagcgatggcactcatgctcttcatggagagggtgtacatgggcattgtcatcatcctcgttaagctcttctggaagaagctccaccagcgctacaagttcgagccactccaag

SEQ ID NO: 47687 - DNA, 270 bp, Glycine max
  Clone ID: 701037826H1
ggaactcaaacctttgtgttgagaatcttagccatgggcagcaacggtttgaggtacgagatcgaacaaaacgcttacataaaactcgtccttcactccctcaaacacccaacctccgccgtcaacggcgtcttgatcggtcgcatctccgcttccaacgacgtcgtcgagatcgccgatgccgtccctctcttccactctcacatcccccttcttctccaattggagatatctctcatcatgatagaggaatatttttctgctaaaggg

SEQ ID NO: 47688 - DNA, 272 bp, Glycine max
  Clone ID: 701037827H1
cctctttaacgttcacaacggaggtagcatccagcttcctcggcctcgcttatcacaatcccaaacccttcactctctcactccaaaccactcttctccctcttctacgcagaacaaccactcattcccgatcgctaacatttcctctccgaccctctcgccgcttcttcgttacctccgccaccactgcacctcctcaatccgaggattccgacgtttccaccgtcattcctcccgacaatcgcataccggcaaccatcatcaccggcttt

SEQ ID NO: 47689 - DNA, 272 bp, Glycine max
  Clone ID: 701037828H1
acgcaacaaacacatagccacatcttctctttctcttcccatggcattctgactcatacccaaatcattgattgtttgtctatcgaatcggtgagaaaatggcagtggagctgatggggttcccccaaatgggcgaacagaaggcaattgaagaagcagccgccgaaggcctcaagggcatggaacacctcctctgtctcctctcccatcaaccttcccacctccgcactcaccacaccgacgccaccgtttccaacttcaaaaaactcatc

SEQ ID NO: 47690 - DNA, 137 bp, Glycine max
  Clone ID: 701037829H1
gagacaataaggaataaaattgctcctcttacgttgcggtcccttaatttcgtgtcaaatgtggcaccgcatgccttatatgtataattaaatactactcaggaactgaagcaatgaaagtatagaattaattttgt

SEQ ID NO: 47691 - DNA, 274 bp, Glycine max
  Clone ID: 701037830H1
taactctttcttgtaactaaagccaaacgcgatattctcaacgcttcattgaattgattcgatattatcccaatttcacaaaccccaacctcgctttctctgtcatccaattcacaccgccatggatcccaaccccggaaccttccctctcctctcctacatcatgtcgcgcctcccttccctcactcccagacccgccgcaccggcaccctccgattccgaccaattcgacatcgaacagccaccggagattgtgggccaaatgccgcacctg

SEQ ID NO: 47692 - DNA, 278 bp, Glycine max
  Clone ID: 701037831H1
cacgcacaaacgcagagtcagactctccaatcttcaatcggagacaaagctagctcgaacgaacgaagtagagtagtgtgctacgcaaaatgtggcggtgcatcgcacgtcgtctccgtggacctgcttccaccagatccacctcccatcactcacttggatctcaactttctagattcttctctagtggggcgaactcctcgtacaccgtggtggatcatacttatgatgctgttgtcgtaggagctggtggcgcgggattgagagctgctattgga

SEQ ID NO: 47693 - DNA, 283 bp, Glycine max
  Clone ID: 701037832H1
cgctgtagctatatgcgcaaatctagaaaaacatacgttttgtttggtagttgggtttaatagttcacactaatcttttagctgagtgaagagaacacaagagccttaaggtactctgatgtttttatcacatgatcatagggtcattttgcaatctcactttttaaaacaaagtttggtaattctaatttttaatacctttttatttttgaatatcttattagacaccctttcttcttacattctttattattggaatatgttcaagtttgtcgtactcggg

SEQ ID NO: 47694 - DNA, 284 bp, Glycine max
  Clone ID: 701037833H1
ctcattttctgttgtaccatactctgcacctgtttcctctgacgctcaacctttctctacaaactctcagtttccgtctcaagatatgtcatcttcacagccagaaacagatattcttgcagacattcttcctcaagcaccattatctgagatgcattcacagcagaacattccagttcctacagatcaattttctcaacaacccttttctgctcctaatggccaaccaggacaagtacaatcatccttttcatctccctccagtcaatatgcacaaccaccct

SEQ ID NO: 47695 - DNA, 257 bp, Glycine max
  Clone ID: 701037834H1
gttttgctgacagaaattctagggacaaccatcgattgagttgtccttatagaggcagtgcttcaacagattatggaggttcaaattttcatgttaatgaggcaaagccggtcatattcccccaacagtcctttgttcaaccaaaacctactactactccgtctgttgttaacttggttccatctgttattgatctaaccggactcggagttccagaagatggcaagaaaatgatcactgactttatgtcaactatg

SEQ ID NO: 47696 - DNA, 275 bp, Glycine max
  Clone ID: 701037835H1
aggagacagggtaatattacaggaatggtttgaccgcgttgactcggagaaaagtggaagcataacagcggtacagctgaagactgctcttgctgtgggcaacctggaatttccgctctcagttgttcagcaaatgatcaggatgtacgatttcgacaggaatggtactatgagctttcaagaatttgttgcactcaacaacttccttcttaaggttcaacatgcattttctgatctagagaggggtcgtggttttcttgtacctgatgatgtat

SEQ ID NO: 47697 - DNA, 271 bp, Glycine max
  Clone ID: 701037836H1
aaagaatcccaggcgaggagaaagatggaggggaaggagcaggatgtgtcgttgggagcgaacaagttccccgagagacagccaattgggacggcggcgcagagccaagacgactgacaggactaccaggagccggcgccggcgccgctggttgacccgacggagtttacgtcatggtcgttttacagagcagggatagcagagtttgtggccacttttctgtttctctacatcactgtcttaaccgttatgggagtcgccggggctaagt

SEQ ID NO: 47698 - DNA, 270 bp, Glycine max
  Clone ID: 701037837H1
atcaaatctgagtcccttgatttctctcctgtagaaaatgcaatcggaatgattgaaacacgaaccgctgccttaagaaatgagcttgaagagcctcgaagttcagagggggatcaacttccaagactccagagtctacaaagaatcctacaaggcagtgttgcagtacaagtgaatagtggagtcttgagtgtctgcactgccttcttgtccggggagcctgcgaccaggttacgatcacaggaactgcagcaacttatagctgccctt

SEQ ID NO: 47699 - DNA, 274 bp, Glycine max
  Clone ID: 701037814H1
ttcttctcttgcggctagggttttagcgcacttcttctagatttaaggaagatgggtaaggaaaaggttcacatcagtattgtggtcattggccatgtcgactctgggaaatccactaccactggtcacctgatttacaagcttggaggcattgacaagcgtgttattgagaggtttgagaaggaagctgctgagatgaacaagaggtctttcaagtatgcctgggtgctggacaaacttaaggctgagcgtgaaagaggaatcaccattgata

SEQ ID NO: 47700 - DNA, 273 bp, Glycine max
  Clone ID: 701037784H1
tctcgatttaccaccaaaaacagccacctgaggtttcaatttctctgagaaataaagagagctcctatctcttctctgcgacgacgccgtttctctcccttgaggccttttattcaagcatgggagatagcgaaccggtggtcactgaagcatctgctgctgaggcatatgcttcggctggttatgctgagactgggtcaaatcctactcccgacgcaggtgctgctgttgatcaatccgctggagaagctgctcaggccagctcaacttacg

SEQ ID NO: 47701 - DNA, 275 bp, Glycine max
  Clone ID: 701037785H1
caaagctcaatattcattcgtccatggcactctcttctcgtctcttttccaaatccaaatcgatctatggctgtcaaatacttctgcacaaggagcatgctattccagttcgtcactttgctaaagagtctgcacctcctgcccttaagggagatcagatgctgaagaacatttttgtggaggtgaagaacaaatttgagactgccataggaatattagagaaggagaagatcaccattgacccagaagatccagctgctgtttctcattatgca

SEQ ID NO: 47702 - DNA, 278 bp, Glycine max
  Clone ID: 701037786H1
cttccaacctcttcaacactccagacccctccttcaacctcacactccaaacccacctctcattccctagagtaagaccctcccctccatttctcattattcattaacgccgataaagcaaaaaatacacccttcacaagttcacataaacacacccgaagagaaaaagaaataaagagagagagagagtcgggtagggttttgttctttgttactcgtttccttccaaattagggtttccctttttgattcaccaaacttctcccgattcgaattcg

SEQ ID NO: 47703 - DNA, 275 bp, Glycine max
  Clone ID: 701037787H1
ggtcaagagagaggagtggcggaatctgtttctgaaaaatcgccgcaaagcgaagtcaatctcatattaactgcaactgcaactacgaactacgaacatcagggtagtgattaagaaaaaccctagcaatggggaagaagcagcacagcaaagacagaatgttcatcaccaaaacggagtgcgcaacggagtggggaggcgctaaatccaaagaaaatcgcactcccttcaaacgtcttcccttctattgctgctcgcttacgtttacgccgttt

SEQ ID NO: 47704 - DNA, 275 bp, Glycine max
  Clone ID: 701037788H1
ctcttaataccaattttctagggtttatacaattctcgatggcctcttcagatgtcgagtaccgttgctttgtcggtgggctcgcttggcccactgacgaccaagctctcgagagagccttctctcagtacggcgaaatcgttgaaacgaagattatcaacgatcgtgagactggaagatccaggggttttggatttgtgaccttcgcctcggagcagtccatgacagacgccatcgaacggatgaacggccaaaaccttgacggccgtaacatc

SEQ ID NO: 47705 - DNA, 272 bp, Glycine max
  unsure (1)..(272): unsure at all n locations
  Clone ID: 701037789H1
aanagaaagaatcccaggcgatgagagagatggaggggaaggagcaggatgtgtcgttgggagcgaacaagttccccgagagacagccaattgggacggcggcgcagagccaagacgacggcaaggactaccaggagccggcgccggcgccgctggttgacccgacggagtttacgtcatggtcgttttacagagcagggatagcagagtttgtggccacttttctgtttctctacatcactgtcttaaccgttatgggagtcgcggggcta

SEQ ID NO: 47706 - DNA, 269 bp, Glycine max
  Clone ID: 701037790H1
ccactattggcgggatggtcaaaccgctttgattttattgtcacggtgacaattgccattggagaaactgtaacttttgctgtacctgatgatgatcttcctttcatctcaaatggagaatggattcgttaccttcttcttgcaagaatgttgagattaataaggatcctaatgtatgtcaagcgataccgagcctttgtggcaactttattgactctcataccaagtttgatgccatacctagggatcatattttgtaccttgtgtat

SEQ ID NO: 47707 - DNA, 267 bp, Glycine max
  Clone ID: 701037791H1
cagcagtgcagggaagttggtgtgtgtcaccggtgctgccggttatattgcttcatggattgtcaagttcctacttgaacgtggttacactgtcagggccactgatccaaacccaaatgatcacacgaaggtagaacatttgctaaaacttgaaggtgcaaaggagagactgcacctttttaaggcagatcttttgggtgaaaattcttttgactccattgttgagggctgtgatggcgtctttcatactgcttctccttttattat

SEQ ID NO: 47708 - DNA, 268 bp, Glycine max
  Clone ID: 701037792H1
gtaagcgataagcaatagaattcagagagagagagaaagagagtctcttgctctgtatctttgatttgatcattccaatcttcaatttttctatatatccatcaatccgctgagtgcaaagttctaatctttcgcctattgggttctactcctttctctcttcgtttccgatcgatccaattttcttcccatggctacgatcggacacaacaatctcaatgccaaattggttcttctcggggacatgggtgctgggaaatccagcctc

SEQ ID NO: 47709 - DNA, 268 bp, Glycine max
  Clone ID: 701037794H1
attccctctctcactccttcatctacttcacatattatatcatcacatatcatagtgatatcatatcacaatgtgtggcatacttgctgtgcttgcttgctctgattcatctcaagccaaaagggtccgcgtccttgagctttctcgcagattgaagcaccgtggtcctgactggagtgggctccactctcatggtgataactatttggctcatcaacggttagccatagttgatccagcttctggtgatcaacccctcttcaatgaa

SEQ ID NO: 47710 - DNA, 238 bp, Glycine max
  Clone ID: 701037795H1
caagagggagagtgagggaaggtaacaataagggaaatgaagaggagcagagatatggagaagagatcagagattaaatctgcaattgaagagttgtctatgctggttatagtcaaacctgaaggaaatcatgtcatgattgctcacatccccaccaagcctttcctgtctctatgtcacttggttctacaagttcttgataagataagaccaacgatggccgttttgagacaagacg

SEQ ID NO: 47711 - DNA, 287 bp, Glycine max
  Clone ID: 701037801H1
caaggcattgcatccgatgataggttcgccaatgccatgggcttcatgtctcaggaggttgcttctggctgtgctgaggtcctcaggcaatacgaggagttcgacaatgagaattaattacgtaattaatttcagtaatactgttattattaatctactttcgatttgggttttctaatgtctatttaattcaatcttgatgtggagtcttatctcgacattttcatattatcatgttatatatgttgatggaccgaccctgcttaattatattattacatcaagat

SEQ ID NO: 47712 - DNA, 282 bp, Glycine max
  Clone ID: 701037802H1
gttgttcgcaagaaaccggagcgttgattttcttctatttctcgatcgtcttcacgaggaagaatggcaaagagttacttcaaacaagagcatgatcttgagaacagaagagctgaggctgctaggattagagagaaatacccagaccgtatcccggtgattgtggagaaggcagaaagaagtgatatcccaagtattgacaagaagaagtaccttgtccctgctgatctgacagttggacagtttgtctatgttatccgcaaaaggattaaattaagtgca

SEQ ID NO: 47713 - DNA, 275 bp, Glycine max
  Clone ID: 701037803H1
gattgctagaatggaatttcgatgctcagtcatctcttttaccattctcttctctcttgctcttgcaggagagagccatgtccatgcatcgctacctgaggaagattattgggaagctgtttggccaaacactcccattcccactgcactgcgagagactctaaagcctctccctacaggtgttgaaatcgatgaactccctaagcaaattgatgatacacagtacccaaaaacattcttctataaagaagaccttcatccaggcaaaacaatga

SEQ ID NO: 47714 - DNA, 111 bp, Glycine max
  Clone ID: 701037804H1
ctttctctctctctctctctctctctgaagatggcttcacgcacgctcgtatcttctctgattcgatcctcccttcgtagatctcaatcgaagccctcaatttccacacaa

SEQ ID NO: 47715 - DNA, 276 bp, Glycine max
  Clone ID: 701037805H1
cccttgttcgtttcactctcacaatggactccctctctctcttctgcaccggaccccttctcgccggcggcctctactggttcgtctgtgttctgggccccgccgagcagaagggcaaacgcgccaccgatctatccggcggctccatctccgccgagaaagtccaagacaactacaagccgtactggtccttcttccgccgccccaaggagatcgagaccgccgacaaagttcccgacttcgtcgacaccttctacaatctagtcaccgacatct

SEQ ID NO: 47716 - DNA, 274 bp, Glycine max
  Clone ID: 701037806H1
agacagctcagtttgtacatgagagccagtgtcagatttgggatacagctaagtttttttttttgaagtgttgaggagttgtaggatcatatcctacggtgggtatcatcgcaggctaacaattctccaacggaacatgtctcatcggcatcaccgatccctgcagaatattgtgtaatcagactagtcactaatctctttggttgacaataattgtcataataccagtgattgttgcatagaaaatttgcccatgtatttatacctcagcaca

SEQ ID NO: 47717 - DNA, 271 bp, Glycine max
  Clone ID: 701037808H1
gtatgcaggtactgaggtggatttcgatggtacaaagcatcttattgtgaaggatgatgacattgttggtatccttgaaactgatgacatcaaggatcttaaacccttgaatgatagagtcctcataaaggttgctgaagctgaggaaaaaacctctggcggtttgttgcttacagaggcaaccaaggacaaaccttcgattggaacagtgatagccgttgggccggggcatctggacgaggaaggcaacagaaaacctttgtccgtgact

SEQ ID NO: 47718 - DNA, 273 bp, Glycine max
  Clone ID: 701037809H1
gttgctgcttcttaagcctttttcttttcttatgtgggttccccccttcccctttcgactttctgcactttagagagaccaccagacatggctggcagtaaccaggtcaatctcaatgaatctaggagtgttgttccgttaaatacatgggtgcttatttccaatttcaagctgtcttacaagcttctcagacgtgacgatggaacgttcaatcgtgagttggcggagtttctggataggaaggtccccgcgaacgcaattcctgttgaaggg

SEQ ID NO: 47719 - DNA, 270 bp, Glycine max
  Clone ID: 701037810H1
atttggtttggttacttgctcgaatttcctcgaatcgcttaatttgtatttgattagttaaaccgcaacgcggaatctcttttctcgaactggctaactctcaggcaagtggttcggacgctgattccagcaacaagcggctggtgctcgcactgtatgacgccctaaactccggcgactccgacgccgtcgtcaagatcgtcgccgccgacctcgagtggtggttccatggtccgccctcacaccagtctttgatgcgcatgctcaccg

SEQ ID NO: 47720 - DNA, 271 bp, Glycine max
  Clone ID: 701037811H1
caggaatgctaaaagaacaacaattgccaaacccattttaacacagattcataccatgcgaggactggcgttttgactttctcagaatgtcctgcatccagtacctcaaacacacctgaatcctttgctctctccctagaacggtgaccacgatccttgagtttgtccctctcagcttcctctcgttcacgctttgtcagaatcccttctacgatctctatctctggattttgttctgtccctgtcacgatctctatctcattcccaatcc

SEQ ID NO: 47721 - DNA, 271 bp, Glycine max
  Clone ID: 701037812H1
gtgaatcaaggggacatgacccttgggaacagtcacaaccaaccgttatgatccaccccagggttgcaaggtcaagagatgcgaatcaagggggcatgacccttggaaacagtcacagccattcagaataattgtgtccattagatgtaatataaatagaagtaaaccagaatgggaaagacactctggaattaggaagaatctgaattgtggagagacaggctctcgaaaacctgtgtaataaaatatctcaaattatctataaaaattt

SEQ ID NO: 47722 - DNA, 248 bp, Glycine max
  Clone ID: 701037813H1
tgaaaattgaggtgacaccaagagagacttttaattctatctctctaattttttatttaatttttttattcttgggttaaccgaggcattttattaaccctatttgtctttggttcttttttttttttggaaagatcactcagttaattcttcattgtaagtagagtacaaaatttctaattaaacattagatatttttaatctgtaataaaaattcagctattaagaacaatctggtgttgtacttc

SEQ ID NO: 47723 - DNA, 275 bp, Glycine max
  Clone ID: 701037783H1
tgcggaatcagctagaattttctaataatggccaaagacgttgagcaggttacagagcaaggtgaatactccccgaaggattaccatgacccacctccggcgccgttgatcgacccagatgagctcactaagtggtccttgtacagagccgccatagctgagttcatagcaacactccttttcctttacatcaccgtgttgaccattattggctacaagagacagagtgacaccaagatccccggtaacaccgagtgcgacggcgttggcatttt

SEQ ID NO: 47724 - DNA, 262 bp, Glycine max
  Clone ID: 701037757H1
tggacatgggcatgggcatggcaacattggtgggtatagctatgtgccagtgtacccggagcagatgcactttcacttgcatgcaccaccaccacaaattttcagtgatgaaaacccgaatgcttgttctgtcatgtgagtgacgctgtttctttccattcaactggctgacggatcgcgataatcatcgtgtgcttagagaactagactctagtatctagttctctaagcacaccatcattatcaccatccatcacccagt

SEQ ID NO: 47725 - DNA, 279 bp, Glycine max
  Clone ID: 701037758H1
cgcgtgccctcgagcgaatcggctcgagggctcgagcttccttactctactcttcctttctctcactcctcggtgtccttctttacccacttccactcctccgcatgccccttcttcttcctcccttccccttctctggataaggaaagacggagcaaagcgtaagaacggcaggatgagtaaaaaacaaagagagcaaaatcactttgtcctggtgcatggtataggccatggtgcctggtgttggtacaagcttaagccactgttggaatccgccgg

SEQ ID NO: 47726 - DNA, 272 bp, Glycine max
  Clone ID: 701037759H1
cacgtctcagatttcccagatccaagcccaagcccaagcccagaactcgctctctcttaatttcttgggccccaagcccgttcctatgaagcacgttggtgggccggcgaagccacgaagctgtaccggggcgtgaggcagaggcattgggggaagtgggtggcggagataaggctaccgaagaaccgaaccaggctttggctcggaaccttcgacacagccgaggaagccgctttggcttacgacaaagccgcgtacacgctccgaggcga

SEQ ID NO: 47727 - DNA, 273 bp, Glycine max
  Clone ID: 701037761H1
ctggcatcatctcagtcgaggaagagagttgacgccgtcgattctcgcgctgcttccgttctcgttcgcgccaaagatggcagtgcttttgctcgttgcgacgattgcaagaagaatgtgccggtacgcactcatcgacatgcacagttgcagccttgaagctaaaattaaaatgaacctagacgctcaagttgtggaacaggctgctgaagctaagaagccagagaggaagaagcccaaatctaaagagcctatggcaaaaaaggctaaagt

SEQ ID NO: 47728 - DNA, 270 bp, Glycine max
  Clone ID: 701037762H1
ccaattttcaataattcacgactccttccgagatctctctctctcgcccacaatccaaccatggcgaatacggggaatttagacgcggcgatagagcaattgctgaacgtggagaagcagatgaggctcgccggtgacgtggcgggtaccagaaaagcagccaccgatattttgcagctctgcttcgatgcacgagcctggaaaacactcaatgaccagattgtcgttttgtcaaaacgacgtggccagctcaagcaggctgtaacagct

SEQ ID NO: 47729 - DNA, 272 bp, Glycine max
  Clone ID: 701037763H1
caccaacacacacttttttatttagtggaaaatttcattgaaacacctcacaaacatgccttttgaatcatcagccaagtctagtcaatctccccctgctgaaggcgacaagcacaagcatttggacagggaaattagggagatggtatctgccatcactcaccgtgtaactgattttcacaaagctggctccacccaccatttggagaaagagcatgaagatgacacgaggatcattaccctcacaggaaccaatgatggagcaacactgc

SEQ ID NO: 47730 - DNA, 271 bp, Glycine max
  Clone ID: 701037764H1
cgaaagtcgcggctttgaactcttctacgacgacggcaccggttccggcctccgacccctgccaccaagcatgtcagagtttcttctcggatctggcttcgataggcctttggaacaactctctcagattgagatcaacggtattggaaggtacgagcaccctcctgcttcaaaagcagccattgattcattaccaaccatcgaaatcgatgacacccatttagccatggaatcacactgcgcggtctgcaaggaagcttttgaaacaagc

SEQ ID NO: 47731 - DNA, 270 bp, Glycine max
  Clone ID: 701037766H1
ctgcttcaacttgctccctcagaagcgaataacaatccacagagcactagtctcctactctcatccgcaagaaaaaaatggcatctcacatcgttggatacccccgtattggtcccaatagagagctcaagttcgctctcgagtctatctgggatggcaagagtactgcgacgatttgcacaaggtgtcttctgatctcacggcatccatctggactcagatggctcatcgtgggatcatgtacatccccagcaacactttctctcacta

SEQ ID NO: 47732 - DNA, 274 bp, Glycine max
  Clone ID: 701037767H1
caagagtctcacagcacactcagatctctcttctctatcctcaattccattgttgtctggttcccttcactctcacaatgcgaatcctcgtcctgctctctctcgccacccttctcctcttctcctccttctctcccaccttctgcgaccacctcgccgacgacgaggacctcagcttcctcgacgagccctccgccgcgccggagcacgaccaccactacggcgccgatgactccaatttcggcgactttgaggacttcgaggacgacgacgc

SEQ ID NO: 47733 - DNA, 277 bp, Glycine max
  Clone ID: 701037769H1
ctttcattttccctcactttctcgctcgccaaacgcccctctctctcctccaatggccgaccagctcaccgacgaccagatcgccgagttcaaggaggccttcagcctcttcgacaaggacggcgatggttgtattactactaaggaacttgggactgtgatgcggtcactagggcaaaacccaactgaggcagaactgcaggatatgattaatgaggttgatgctgatggcaatggaaccatcgacttcccagagttcctcaacctgatggctcga

SEQ ID NO: 47734 - DNA, 277 bp, Glycine max
  Clone ID: 701037770H1
gggcgccgtgctaaaatcatggccaccacagccaccgaacctctcccttcctccgctgaaatgcctcctgccccgcctcctccgaagcaaccgccgcaaccggtggcggcggcgtcagcagtgaagcctgaggctccattgtccgattcgaaagcttcggcggaggcgaacgtaatagtggtcccgagctactctcgttggttctcgtgggattcgattgacgaatgcgaggtgcgtcacctccccgagttcttcgaatcggcgtcgaagagcccta

SEQ ID NO: 47735 - DNA, 275 bp, Glycine max
  Clone ID: 701037771H1
gcacatttgcagagctacattcagacacattatgcggctcctaggatggtgatagctgcatctggagctgtcaagcatgaagacattgttgaacaagtgaaaaagttgtttaccaagttgtcaacggatcccactaccacatctcaatcagttgctaaagagccagctatttttactggttctgaggttagaatgcttgatgatgatattcccctagcacaatatgctgtggcttttgaaggggcatcttggaaggatcccgattcgattcctct

SEQ ID NO: 47736 - DNA, 275 bp, Glycine max
  Clone ID: 701037772H1
agccaagcaagaagtgtgtatttgaacaaaagtttaatttttttttagccaaaacactttttaactcttattttgaagcaaaagaaacacacaataaagagagaaatattgcagtgatatttttctgggggttgagaaagagaacagaagaaaagacagaaagctcaacgtcagagttagccgtataaggttcgcttattgtgtgtttgtggttttggactagctgaggtttgtcctttggatcccagaaacctttccagcatttgaaaaaccaa

SEQ ID NO: 47737 - DNA, 275 bp, Glycine max
  Clone ID: 701037773H1
catggaaccattaacaaaaggagagtatcctaaaaacatgcgagcactggtgggaagtagattgcctaagttcaccaaatggcaagccaagctagtgaatggatcatttgattttattggcttaaactattactcctctggttatattaatggtgtccctccaagcaacgacaaacccaattttctaacagattctcgcaccaacacttcatttgaacgcaatggaagacccctaggtctaagggccgcttcagtttggatatacttttatccaa

SEQ ID NO: 47738 - DNA, 271 bp, Glycine max
  Clone ID: 701037774H1
cggggtcagagtgagaaagagaaagagagaattcgtaaaccctaatttcggaaagatcggcgatgactgcctccaaggatcgcgagaacttcgtctacatcgccaaactcgccgagcaggccgagcgttacgaagagatggtggaatcaatgaagaacgttgcgaatctcgacgttgaactgacggtggaggagcggaatttgctttctgttgggtacaagaatgtgattggtgctcgcaaacgtccctggaggatcctgtcttccattga

SEQ ID NO: 47739 - DNA, 272 bp, Glycine max
  Clone ID: 701037775H1
cccacacacacggctcgtgcgagaaccaggtccgtagttcttagggtgagaatcctcatggattgatcaggaaatatgggcttatgtgttgcaggcagtgcttccgaagcaatgccaaggaaattggcttcatcaagtatcggtgaaagattagttttccacctgccccacccggtttggattcttgcatcaggctatgatgacgtggggatgattttactgtgtgaagaacttaaaattttttgtgacatttagcaaagttaattatcaaa

SEQ ID NO: 47740 - DNA, 272 bp, Glycine max
  Clone ID: 701037776H1
ggctactctgaagggaaagtacgatgtcgacaaaaacggcgctgcctttgccaacatcgccgtcaacgccggcgacgtcaagttccgagcctccgtaacggaagccactttcattaacggtcccagcttcaccggctatcgcgctcgacgtcgagaaacccggttccttcatcgtcgactacaacgttcccaaaaaggactttcggtttcagtttatgaacacggttagggttcgggagacgccgttgaatttgacctacgcgcacagcagg

SEQ ID NO: 47741 - DNA, 272 bp, Glycine max
  Clone ID: 701037777H1
cacgcccagagagagagagagagagttgtggaaatggaagaaggtgttggcgccatctttctcgactccaattcagagactgtcggacttggaggtacaaaagcaaagaaagtgaaagtgctgaagggagattccgttcctgttggaacggaagtgagagcgaacgtgggagcttcccagaacaaaattcttgctgacataagcaactttccccaacaaccaaagcaacacatctctgttgaccaccttctcaaggaaaaggaaattttgat

SEQ ID NO: 47742 - DNA, 269 bp, Glycine max
  Clone ID: 701037778H1
attttattttgctctacctcctcacttctagggttcgcagcttgtctctcaaacaatggcgctgttccttctctacgaatccgcttcgggctacaccctgttcgacgttcacggcctcgacgaaatcggccagaacaccgaagcggttcggaactccgtttcggacctcaacaggttcggcaaagtcgttaagcttcgctccttcaaccctttcacttccgctctcgatgctctcaaacagtgcaacgccgtctctgaaggcatattaa

SEQ ID NO: 47743 - DNA, 266 bp, Glycine max
  unsure (1)..(266): unsure at all n locations
  Clone ID: 701037779H1
cttcttcccaagcactactactcactcactgcagatctcaattgccatcgtgtccatggctaccatcgttagcatcaaggcccgccagatcttcgacagtcgtggcaatccaactgtcgaggtggatttgacttgctccgatggtacttttgccagagctgctgttccaagtggtgcatccactgggatttatgaggcccttgaattgagagatggaggatctgactaccttgganagggtgtatcaaaggctgttgacaatgtga

SEQ ID NO: 47744 - DNA, 271 bp, Glycine max
  Clone ID: 701037780H1
ctcggggtgagttgactcagcgatggcggaagacgtgactcgggtgatggtggcagtgaacgagtcgagcatgaagggataccctcatccttcgatcagcagcaaaggggctttcgaatggaccatcaacaagatcgttcgcaacaacgtctctgccttcaaccttctttttcttcacgttcaagtccccgatgaagatggttttaatgacatggatagtatctacgcatcgcctgacgattttaagaacatgaatcagagagatagaatt

SEQ ID NO: 47745 - DNA, 272 bp, Glycine max
  Clone ID: 701037781H1
ggagaaattaggtgacagaattaccgcccttcatcaactcgtttccccattcggaaagactgacacggcttctgtcttattagaagctattggctatatcagattccttcagagtcaaattgaggcccttagcttaccatacttgggcagtggatcaggatacatgagacagcaacaatccgtaagacataataccaacccaccatttctggttcaaggagagaacaattgtatattccctgaagacacctgtcagttgctgaatgaaaact

SEQ ID NO: 47746 - DNA, 277 bp, Glycine max
  Clone ID: 701037756H1
ctcaaattagtatttggtttctgcgaaattgcaaaagcaaaacaacatccatcttcttctgcaaaataattctagtaatccataatttgttgccgttcttccttcgtacaatgtcagcactactctagcattcccaactctacaaacacatcatcatctttttgcttttttcttcttctcactaactcagacaactaccatggcctcaaaatccagacccaatctatctgaaaattccaacaaaggatcaattgcaactcctagagtcagtaaaact

SEQ ID NO: 47747 - DNA, 273 bp, Glycine max
  Clone ID: 701037731H1
gccaaggacgaaacaagccgaagatgagcgaactcgagaattcagaaatatgaaaaagaagagaagtaaaactgaactcgataatctcgttgaactcaggacaaattgaatacttaatttctcttctctctagaaacgtatagacgaaacaatttctatgactatttctgcttctgcttcagatgcaaccttttagtttttgcagttgccacttcatgtcttcatcccttcttctaattctccgatctccgatgtttcccttcccaagaagac

SEQ ID NO: 47748 - DNA, 276 bp, Glycine max
  Clone ID: 701037732H1
cgaattgagactaataatggatggtatagttcagctggagaggcaacttgttgattatactgcttctctatttcatgagggctttctagatgaccaatttaaccagcttcagcaacttcaagatgaaagtaacccagattttgtggttgaagtggtgactctcttttttgaagacgcggataggcttcttaatgagctcacaaaagcactaggccagccaagcattgattttaaaaggttggatgctcatgttcaccagttgaagggtagcagctc

SEQ ID NO: 47749 - DNA, 279 bp, Glycine max
  Clone ID: 701037734H1
gccctggaactggtcagagtttccaacaaaggttgctgtacagttgaatgatacacacccaacacttgcaataccagagttgatgcgattactaatggatgatgaagggcttggatgggatgaagcatgggatgtgacatcaaagactattgcgtacactaatcatactgtcctccctgaagcactggagaaatggtctcaacctgtaatgtggaaactacttccacgccatatggacatcatacaagacatagacaagagattcactgcaatgataaa

SEQ ID NO: 47750 - DNA, 261 bp, Glycine max
  Clone ID: 701037735H1
gccccatatcacaaaccacattataaaaagactaccacgtattcttctctctacgtctctctctctctctctctctctacacagtgacaatggcggatccaatcgcgaaggatctgatcgcgtttgcgctcttagcctccctcttgctgtgttcacatgcttgctgagacgttccctacatcgttgctcaaaagataggctccctcaacagactcaagtactacgccgaaaggtgactcgaacatagccgacatcttcaga

SEQ ID NO: 47751 - DNA, 274 bp, Glycine max
  Clone ID: 701037736H1
gttcttccatttgactcttgttctgaacgacttttcaagagaatcaaaccatggcagtgaaagtatacggtcaccactgtgcttccaccaagcgggtgctggtttgtctggttgagcaggaagtcgaatttgaagttgtccctgttgatgtcactaacggggaccagaaggatcctgagtacctcaaactacagccatttggagttgttcctgtcatcaaagatggagactatacctcatatgaatctcgagctataatgaggtattatgcaga

SEQ ID NO: 47752 - DNA, 278 bp, Glycine max
  Clone ID: 701037737H1
atcgaagaagaagatggctttaggtgttcctgctcttccgttgacatacgtggctcacgttctggcagttgttgccagcgtcttggtcgtggtctgggtcgtcaatttcaggggtggcttggcttgggattctgataacaagtccctcatcttcaacattcatccagttcttattgttattggcttactagttcatgggggtgaagctattataagttacaaagctctttcccctaaagaaggaagtgaagaaattgatacaccttgttttccatgcc

SEQ ID NO: 47753 - DNA, 132 bp, Glycine max
  Clone ID: 701037738H1
gttggaggaattgttagcagtggacgaggaagtagcacgggaagccgaaaagggtggcgagaaattatccgaagcagaggttttgagcacagccgacgcgatcgtaattgacctcgtgagcgatgacacata

SEQ ID NO: 47754 - DNA, 279 bp, Glycine max
  Clone ID: 701037739H1
catcaagatcaatcaacaagaccaagaccaccatgtcagcgaaccccacgacaacaccaacaccaacaccaactttgacctcgacgccaaccacgccaaccatgctgccatacctccaaggccgcgtggtcactcgcctccagcagttcgtgctgctcccagaggcagcgcagcgcgagatcctcgacctcgaagtctacctgaccaaccaccagaccgtcatcttcagtcagcaccacgtgaagctcgtcaagagcgtgcgtcgcgtccgcgtcaaag

SEQ ID NO: 47755 - DNA, 276 bp, Glycine max
  Clone ID: 701037740H1
caagagcgaccttcttcggtgctcgcaaagtataagtcctcatgggtaaggccaagactcacatcaacactgacgtcattggacatgctcgactctggtgaagtcgactatcactggtcatttgatctacaagctttgaggtattgacaagcgtgtgattgagaggttcgagaatgaggctgctgagatgaacgagagcgtcattcaagtatgcctgggctgctgacaagctcgaggctgagcgcgacacaggaattaccattgatattgctttgt

SEQ ID NO: 47756 - DNA, 273 bp, Glycine max
  Clone ID: 701037742H1
cgaagatctggcctataagaatactgttgagtctataacaggaattatatctaaaaccatctcaactaagggcatgctagctgtatacaatgctttatctgaagatgagaaaagggaatttgagaaggcttatagtgcttctttttatccttgcatggaaattctgtatgagtgctacgaggatgtagccagtggtagtgagattcgcagtgttgttttggctgggcgtcgcttttatgagaaagagggtctacctgcttttcccatgggtaa

SEQ ID NO: 47757 - DNA, 259 bp, Glycine max
  Clone ID: 701037743H1
cttcctcgcctagctagctccagaaaattaggatctgcttcagatctagtgtttccctgtcccaaatcacgagtccattgagtttgattttgtggatgaaaagcatagatagggcttttgcaaaactctccaatgtttcttgaaattatatgaccatgcgtcgaattcgtatgctgcactccttctccgtcgtgttcctctactggttctacgttttctcatgaactccctcttaaatccgtgattaattagatctatc

SEQ ID NO: 47758 - DNA, 274 bp, Glycine max
  Clone ID: 701037744H1
cagcaatggcgaagggtgaagacgctttgattcgaaagacgaataaaaagcttcgaaagaacaacagcagcggctcttcctctgtctccgccaaggttgccgccgttatcgccgccaagaagcgccgcaacgccggtaaacgccgcatgtgccaggggatgtgctttagtctacctactctggatgatcccttcaatgatcgaggtgggaaagaggaaaccaaaacaaagggtcctaaaaagaaatcccattcaaaaccaaaagacaagatgga

SEQ ID NO: 47759 - DNA, 273 bp, Glycine max
  Clone ID: 701037745H1
ctaagtactataaagaaggatttaagactttaaagctgaaagagggcaagaatctgaatgcagatatagaagtgcttcaagctatacgtgttgcacaccctgagtgtcagtttattcttgatgctaatgaggggtataactctgaggaagcagttgaagttcttgagaaactacatgatatgaggttgactcctgttctatttgagcaaccagttcatagagatgattgggatggtcttcggtatgtcggtaatatagcaagagagagatatg

SEQ ID NO: 47760 - DNA, 274 bp, Glycine max
  Clone ID: 701037746H1
gcgacaagggtcttctgtacattccgccgttcatgatggttttccacttacaatgggaaccatgcagaactgtgaccaaaccatttcattggctgactttagtaaaggagacagaagtaaaaacctcggcgagtgaggaagacgagccgagctataccgaggatggtgttgattgtcaccatgaaacaactagagggaagaaaggatcaccttggcagcgtgtgaagtggactgataagatggtaaagcttctgataacagctgtttcttatat

SEQ ID NO: 47761 - DNA, 270 bp, Glycine max
  Clone ID: 701037747H1
cacactcattaattgcaagaatggcacttcgttgcttggtgatgtcctttctgttctcttcactcttggtcttgcgagagaaagccatgccagacacgcagatttttggcatgctgtttggccaaacactcccattccaagttcattgcgagatcttctaaagcctggccctgcaagtgttgaaatcgatgctcaccctatgcaaattgaagaaacacagtacccgaaaaccttcttctataaagaagaccttcatccaggcaaaacaat

SEQ ID NO: 47762 - DNA, 274 bp, Glycine max
  Clone ID: 701037748H1
caacgttagtgctttgtttaggtgaactaattcggagaccttgcaagacttcatcaatggctgtcaaagtttatattgtgtactactccatgtatgggcatgttgagaaactagcagaagaaataaagaaaggggcttcctctgtggaaggtgttgaggccaagttatggcaggtacctgagacactgctggatgaggtgcttggtaagatgagtgcaccacccaagagtgacgtaccagtcattacccccaatgaactatccgaggctgatgg

SEQ ID NO: 47763 - DNA, 279 bp, Glycine max
  Clone ID: 701037749H1
ctcactagcctaatttgctcctttagcctcactcctgctctcttctacgtcaaatcctaagacacccatttgaaatttgaaatctcgttctggctaattccatgttcattgtttactatacctcaccactccaagggtctcataaatttcttctgcttccaactctgctgcagaaaaagaaactgttggttctagatacaagtgggtttccagagtagaagtgaggctattgggcatgagataaacagcaagcaccatcatctacgacccttttgacta

SEQ ID NO: 47764 - DNA, 277 bp, Glycine max
  Clone ID: 701037750H1
attttccaccattctgagtaacttcacacaccatataacagaaaatgaggtggggcttgtggaaacttgggcaatcaatccctcgccgtcttgctcacggtaataataaagctgttgcttgtcgatattttgcctcagatgctgagctgaaaaagacagtcctttatgacttccatgttgctaatggagggaagatggtgccatttgctggatggagcatgccaatccaatacaaggactcaattatggactcaacccttaactgtagggagaatgg

SEQ ID NO: 47765 - DNA, 278 bp, Glycine max
  Clone ID: 701037751H1
gttggctgctaataatggtactagcactggtattgaaccctcttcttcatcaggaggaagaagccaagatcgatcaagatcacccaacgtagaagtggcttccaaggaattagggacaaatgatgaagaagagaagaaagagtatggtagacggatagagagagaggatgatagtccctcagggcatgctcataaagttccaaggttcagtcctccaaaggataataatagtgttgacgctgaggctactatgaggaaggcaagagtttctgttagag

SEQ ID NO: 47766 - DNA, 276 bp, Glycine max
  Clone ID: 701037752H1
attatctgttcttttgttctatagttatgtttcttttgtctatatgatatataatcactgtattcatatagttctgtctgaagagaagagttatgatatattaaatataataagtggtttttttcttcttcatttccacgttccatcaaatgaatatgctctttacagtacagccaagtcatcataacgattaataattagctcatagtttttttggaagagttgtgaaaatgggacttgtggagctttttggggcggcatctatgcccgtgatca

SEQ ID NO: 47767 - DNA, 279 bp, Glycine max
  Clone ID: 701037753H1
agacaaccccttctccaccccccaaaaaaccacccagcccatctccttctcgctcctccaaaaagaaaactcctgaaacccctccgcttctctctgatgcctctctcgacaacccggatctcggcccattcctccttaagtcggcccgtgacaccattgcctcgggcgatgggcactccaatgccctcgacttcgccatccgggactccaagtccttcgagcgctgcgccgtcgatggcgagtccagcctcgacctcgccatgagcctctacgtcctcg

SEQ ID NO: 47768 - DNA, 274 bp, Glycine max
  Clone ID: 701037754H1
ctttagacctctctctcacttgaaactccacaaccccattttcctttcctatgaccctattccaaatcaccaattctaattccattcttcaggtgttcaattgaattcgtgatgaagagggatcaccgagatagctgcggcggcggcggcggcggcggcggagggagtgtgaagggtgagtgttcctcaatgccgtcgaacgggaaggcaaatatgtgggaggaacaacaatagcaacaacaggggatggacgagttgctggcggcgttggggt

SEQ ID NO: 47769 - DNA, 277 bp, Glycine max
  Clone ID: 701037755H1
cacctgccatgacagtcataacaatgtctcctttcttatcttactctcgtctttccctcgtgttcttcttcactctcaagtaccttttccaaagaagcagaaaagtacgaaacctgccacctggtccgactcctcttcctataatcggcaaccttaacctcgttgaacaacctatacaccgtttcttccaccgcatgtcccaaagctatggaaacatcatatccctttggtttgggtcacgtcttgtcgaggttgtctcatcaaccacagcgtagca

SEQ ID NO: 47770 - DNA, 274 bp, Glycine max
  Clone ID: 701037730H1
cgaatatatataataagacaaaggcaaaaaaaagaggtgaaaaaaatttgtctggtaaattgttaattctgttgtcttgcgtgttctctggactcaggagctgcgctgttcccggggaaaagcatgtacagtatgaacactaaatgcagtgctggggattgccaattgatgtcatggtcttcaccattgccaccacagtttctttgaaactgctcaaggtctagggttctatttaacttctgcacctgagcttttatatttaagagtgtttata

SEQ ID NO: 47771 - DNA, 96 bp, Glycine max
  Clone ID: 701037694H1
caccgaggacccgcaaaacagtggaaatttcagcaccagcagaattcccttcagctgtgcgcgtgattctcctatacagtgtgactctgcacctgg

SEQ ID NO: 47772 - DNA, 101 bp, Glycine max
  Clone ID: 701037695H1
cgaagtctgagtgctaccgtatgtttattaaacatactgttttaatatttatttaccctaacttttgctcaaaggtatctatagagagatttgttacttga

SEQ ID NO: 47773 - DNA, 92 bp, Glycine max
  Clone ID: 701037696H1
gcaaaacaagtgaggaaagagaccctagtttgccagttcaactatggtgttgttctcttttttcttttttttacattttaccacacaaaacc

SEQ ID NO: 47774 - DNA, 281 bp, Glycine max
  Clone ID: 701037702H1
gtcgaacctcggagatcttcaacgcgaattggagaacaaagccaatgatctcagcaagcttcaaaaggaaattgcgaagaatcaccaaatgagaaagatatacacggtccagcttggcgagaacgagctcgtccttaaggaactggatttattgaaagacgacgcaaatgtttataagctgattgggccagtacttgttaagcaagatttggccgaggccaatgcaaatgtccgcaagagaatcgaatacatctcagctgaattgaagcgtctggatgcca

SEQ ID NO: 47775 - DNA, 281 bp, Glycine max
  Clone ID: 701037703H1
acgcgtgccgtgccggggccatcctgtggagatgttcttcgagtgatgcagcaccagcccgagctcatgttcgagacactcaagcaccgcgcgcaggagtatgtcagccacgacaacgcagcagcgcttctggctgctggccttgctcgcacctttgacagaatgccttatctgctgtctctgtcttcctttgtggctgacgatgttgccgctgctgttcctgctgctcaagatctgggggagcagtggtcttattaatggatgtgcttcaattcaaatag

SEQ ID NO: 47776 - DNA, 75 bp, Glycine max
  Clone ID: 701037704H1
gttatatttctgattctgatttctcactagtgaatttgaggatcagcagtagtgatgaattccacacaacatgcg

SEQ ID NO: 47777 - DNA, 280 bp, Glycine max
  Clone ID: 701037705H1
cacggcctttgtgccggcgacgcatcattcaaatttctgccctatcaactttcgatgctaggatagtggcctaccatggtggtgacgggtgacggagaattagggttcgattccggagagggagcctgagaaacggctaccacatccaaggaaggcagcaggcgcgcaaattacccaatcctgacacggggaggtagtgacaataaataacaataccgggctcattgagtctggtaattggaatgagtacgatctaaatcccttaacgaggatccattgg

SEQ ID NO: 47778 - DNA, 281 bp, Glycine max
  Clone ID: 701037706H1
gtgcagggaagttggtgtgtgtcaccggtgctgccggttatattgcttcatggattgtcgagttcctacttgaacgtggttacactgtcaggaccactgttcgacacccaaatgatcacacgaaggtagaacatttgctaaaacttgaaggtgcaaaggagagactgcaccttgttaaggcagatcttttgggtgaaaattcttttgactccattgctgacggctgtgatggcgtctttcatactgcttctccttttattatcaacgtcaaagacccacag

SEQ ID NO: 47779 - DNA, 279 bp, Glycine max
  Clone ID: 701037710H1
tggcaaatggaaactttgctggttcaggctacaagatcgtatgggtaggttgtgatggagaatatgaagtatacgactcagtcagaaattcttggagtcgtccaggaaacatgcctgtgggcatgaagctgccattgtcgctcaactttaggtctcaagctgtctctattggcagcacactttatttcatgcgttcagacccagacgggattgtttcctatgatatggcaactggggtttggaaacaatatataatcccagcgccactgcatctgactg

SEQ ID NO: 47780 - DNA, 276 bp, Glycine max
  Clone ID: 701037712H1
cttgacggtttctagagagagaaagtgatggccggagttaatccaaacggcgtcgccgattttgcggcggttccgacgcatggcggacagttcattcagtacaacatatttggccacctcttcgaggttacgacgaagtaccgtcctccgatcatgcctatcggacgcggcgcgtacggaatcgtttgctcactgttgaataccgagacgaacgagctggtggctgtgaagaagatagcgaacgctttcgacaatcacatggacgctaagcgtacg

SEQ ID NO: 47781 - DNA, 276 bp, Glycine max
  Clone ID: 701037713H1
ccttgtctgaagatggaaatgatgatgtgggaagttgtgcggagtcttggtctacagcaattatctctgagttatcccaattccctaaagaaaaaaatactgaagaattgagcaaatctgatgccactaaaaagttggaactaatggatgactttctggaggtggagaaattggctcggttatcaaatgatttcagtggagtttcagttacttcaaacaatatggcaaatgaaactgtgaccaatgatgtatcagaggtcagtactgagaaagatg

SEQ ID NO: 47782 - DNA, 276 bp, Glycine max
  Clone ID: 701037714H1
tgaaagctgcttataaacaagctgatggtaggaaaattgatggtagaagggtgcttgtggatgttgagcgtgggaggactgttccaaattggagaccccgtcgcttaggtggtggacttggtaccactagagttggaggtgaagaagttaatcagcgacattctgggagggagcaacaacagtctcgttctgaagaaccgagagtgcgagacgaccgacacgctgatagagacagggaaatatcacgtgaaagacgtagggacaaagacagagaac

SEQ ID NO: 47783 - DNA, 97 bp, Glycine max
  Clone ID: 701037715H1
agtcattgtgccggccacatcgttttaagacccgacacagacacacttggtcttcctctgaccaagaccaacgaaccaacctcttcctccgactacc

SEQ ID NO: 47784 - DNA, 272 bp, Glycine max
  Clone ID: 701037716H1
ctacgaaattggagcagaggagtggcggaggacgaagtcgacggcgacaatggttaacgaaacggtgcggtggtgtgctttgttgtagtcgtctccgatcatcatcgagaatgcgcaatctggctgcacctcattccttgggggttttcatctttcgccccaataagcctccttttctcactctcccctcactctctcgaagatctctcccttccatccagtgcggtgcagttcaattccgcccctgcatcgatatccacaaagggaaagtg

SEQ ID NO: 47785 - DNA, 256 bp, Glycine max
  Clone ID: 701037717H1
ggcaaagtgcatggtggatcagaagaagggagggaaggatctgctactgataaagacaaaaggtggtgaaatccctgttcttctttctgctgctaagggctacaaagacatgactcgctatctttactctcagactcagcttgaagcgttcatcgacaaaaattcccacattggggttttgcttcttgcacgatgcatcaccgctgaaatatctgatgtggctttgagtttaatccatcgcattccaagctgcctc

SEQ ID NO: 47786 - DNA, 281 bp, Glycine max
  Clone ID: 701037718H1
tcaattcacacatccaccgttcagttaaaaaccacccaaatccgatggcggcgtcgcggcgtctccgggacctccaatcccaaccggcgaacaagatctgcgtggactgttcccagaagaacccgcaatgggcctccgtatcgtacggcgtcttcatgtgcctagagtgctcaggcaagcaccgcggcctgggcgtgcacatctccttcgtgcgatccgtgacgatggattcgtggtccgaaatccagatcaagaaaatggaagccggaggcgacgacaaa

SEQ ID NO: 47787 - DNA, 244 bp, Glycine max
  Clone ID: 701037719H1
tctgtctctctctctctcatcacacttgaatgaatattctttcttgaattctcatctgggctcattccttttctcatgcgttgacaaaatcttcacactttcaaagttggtactgataaaacttgaaaataaatcttccctttttgtgtcacaaccatgggttgttgtatgagtaaaacagggtcagagccataagaacacattgtttacagacatgttgcgggtgctgggggtgctggtgtgt

SEQ ID NO: 47788 - DNA, 279 bp, Glycine max
  Clone ID: 701037720H1
gccaatggttggagaacaagactcaacggtagagttgatttgtgagattcataatcataaattgaccaactcattagttgaacatccatgtcccaaatgattgaatacaactgaaaagacacttatgtcacgaagtcaatgttcgaaccaaaaaacatattgatgctccagttaaatgaatatgtcgctacactttccattcgaagtcatgtcggaacccaagacatctgaagtgctgatcagctgcgccaaagatacataccaaggttttgcgggcga

SEQ ID NO: 47789 - DNA, 278 bp, Glycine max
  Clone ID: 701037721H1
cttctcttgcggctagggtttagcgcagttcttctagatttaaggaagatgggtaaggaaaaggttcacatcagtattgtggtcattggccatgtcgactctgggaaatccactaccactggtcacctgatttacaagcttggaggcattgacaagcgtgttattgagaggtttgagaaggaagctgctgagatgaacaagaggtctttcaagtatgcctgggtgctggacaaacttaaggctgagcgtgaaagaggaatcaccattgatattgcttt

SEQ ID NO: 47790 - DNA, 278 bp, Glycine max
  Clone ID: 701037722H1
caaaaactcactgcatcaaaaccttctaattcaagtcgcatgttcttctaccttaaggcagaagtgaagaaccatgagccaacctacactatttagcagtggattcgagcttgcatcttctgtgacaagctctgtcgttcttcacagatcatggaatgttatcacgtcccgttatgccggaatcgttacaaacgtgggacacggagtatcatggaaagtttatagagaaccaggttcggatttgacgattatagcctttgaggtcaagctagattttt

SEQ ID NO: 47791 - DNA, 278 bp, Glycine max
  Clone ID: 701037723H1
ttccgtttctggtttttcccaattccaaagtagtctgttatcatcgtcatccctttataggacagacaaagctgattcacttaggagcctcaagagctatgtctacatcttctcgtgctcttcccactcccttggaaaacaagtatatgaaacccccagattcttttcagctttcacccgtcagagatctgactggaaattctgcctcatcaaattcaatcagaagtgctgggaagatgttgtcttcagcttctgaatgtcccgatgatatcgctttt

SEQ ID NO: 47792 - DNA, 278 bp, Glycine max
  Clone ID: 701037725H1
cggctcgaggtttaatccacctagctgaatggcatccattggaatagcaatgctaaacagggcttgacgcccttccgttcctctcatatcagggtcagcagagtgcagagaaaagagcagttagttattaggatattggctttggccgtttgaggtgcgtcagattgatgctgtgatgggagattataagagtttttcattttccaaaatgatgggctgctgtggttgctttggatttgtccaaaaaccaagaccgcgtcgggctaaacgtagcatca

SEQ ID NO: 47793 - DNA, 277 bp, Glycine max
  Clone ID: 701037727H1
atccaaacaacaatggacccccgtgaatcgataagcaaccaaaccgacgtcgctctgagcatcacaaagctcctgttgtcgaaaaacgctcgggacagtaacctcgtgtactcgccgctgtcgttgcacgttgttctgagcatcatcgcttctggctccaagggccccacactcgatcagcttctctccttcctccgatccaagtccaccgaccatctcaactccttcgcctctcagctcgtcgccgtcgtgctctccgacgccgctcccgccggcg

SEQ ID NO: 47794 - DNA, 273 bp, Glycine max
  Clone ID: 701037728H1
gcaagagcttcttcaatctccagtccaggggtcggatgaccatcttattgagttctctgaagctttaagaactgttgcgaaggctctcaggctagttgctgaagggaaagcttctgctcaagctgaggctactgaatggaaacgtaaatatgagttggagagggatcggaatctgaagtttgaacatgcagagaaatcatgtatagagcatcaggctgatcttgatgatgtgaggacaaataaccctgctaaacaacctactttatgtaatga

SEQ ID NO: 47795 - DNA, 274 bp, Glycine max
  Clone ID: 701037729H1
aaaaccctcttttttctctctcttgcaaaacctaattttcatttcttccctcaaatttcaaaatgcgtgagatccttcacatccagggtggccaatgcggcaaccagatcggcgccaagttctgggaggtggtttgcgcggagcacgggatcgaccctaccggaaggtacggtggggactcggagttgcagctcgagaggatcaatgtctactacaacgaggccagttgcggtcggttcgtgccgcgcgcggttctcatggacctcgaaccggg

SEQ ID NO: 47796 - DNA, 252 bp, Glycine max
  Clone ID: 701037692H1
aagaagggcaaccacttggagcaaagagagaagttaggattgacttctgcccctaaagggcagtcaaagtcacgtacaacactttctgaggcatcaaatgtgcttgaacaaagtgaggttgaaaaagggaagcaagatactgcattgtaagatttaagtgtctcttgggagaatgaaagcatggcattgacagggatctgaattggggccaaccagcctggatggttgacatgtatgggacatgtcgtcgcg

SEQ ID NO: 47797 - DNA, 77 bp, Glycine max
  Clone ID: 701037623H1
cccaactttctctctcaagaaccatcaaatctcgatcctcccctctccctgcaagatccggtggtggttccgattgc

SEQ ID NO: 47798 - DNA, 109 bp, Glycine max
  Clone ID: 701037624H1
cgaattgattcacttcgacgccggcagttagagtcgaattccccaatggcgggttcttcgatcatggagaacactattccatcgcacgttcgaggatctgatcaaaggc

SEQ ID NO: 47799 - DNA, 79 bp, Glycine max
  Clone ID: 701037625H1
catcgagccgaatcggctcgagcggctcgagatgaacttctacaagacaatcatgccctcaggctgaagacatcatcac

SEQ ID NO: 47800 - DNA, 110 bp, Glycine max
  Clone ID: 701037627H1
ctctcagaaagaacttccttcaaccctttcgtgaccttcttgccagacttaaccgttctgccactactcccccagttacttgcttagtctctgattgcttcgtcactttt

SEQ ID NO: 47801 - DNA, 111 bp, Glycine max
  Clone ID: 701037628H1
aactgagactgaaaccttcgtgttcgtgttgcatatccaaaccctaatgtggaaattgaatttttgcaagatggttctggcggagttaggtgggagcatttcgcgtgctct

SEQ ID NO: 47802 - DNA, 80 bp, Glycine max
  Clone ID: 701037629H1
caagacaagacaaagactttctcaaacaaaaccagacggttatctagtcttccaatcttccccctattccctgttcctat

SEQ ID NO: 47803 - DNA, 110 bp, Glycine max
  Clone ID: 701037630H1
cctccttatacactcttctcctctatctaacaacacccaacaaaaatacaaaataaaaaaaattagggttttcaatttggggaaataaaaatagggggaacattctagag

SEQ ID NO: 47804 - DNA, 108 bp, Glycine max
  Clone ID: 701037631H1
gcatctcagaggccgattctttcgccgcttctctctttccttgtggtgttctcgtgttgctcgtaacaaaatggttggaagtgttgacgctttgaatgagggtttgag

SEQ ID NO: 47805 - DNA, 104 bp, Glycine max
  Clone ID: 701037632H1
actctagccgaatcggctcgatgaaagaattcccttcaatgaagaacgtgataatttgtccaccctttccaagacaatatctcaaactgataagtctcctaaca

SEQ ID NO: 47806 - DNA, 111 bp, Glycine max
  Clone ID: 701037634H1
cggctcgagctctctctccctcactctcaccatggaggcgcaaccgccaaccccctcgactgcgacgccgcctctgccgccacacctcaggtacctcggattccgtggaat

SEQ ID NO: 47807 - DNA, 106 bp, Glycine max
  Clone ID: 701037635H1
cgctcaggtagttcgcggcggcgagccggaatcggcaggcggcattcaccaatcagcgccgtcatcgtcctcgtcgtcgtgaccgtctctggttgctgataaagcc

SEQ ID NO: 47808 - DNA, 109 bp, Glycine max
  Clone ID: 701037637H1
tctaaaatcaaaaaccctaaccaagaaagttttcaccgcatctccacctattctcaatctccacaaatcgaaggaaagagaatgagtagacgctcgagcagaactgtct

SEQ ID NO: 47809 - DNA, 88 bp, Glycine max
  Clone ID: 701037638H1
gaaagacacagccattgtttgtttactttccattgattgagcgaaagctttgttttttctgcgatcattttccattgggtggaaagaa

SEQ ID NO: 47810 - DNA, 80 bp, Glycine max
  Clone ID: 701037639H1
gttgtttcctcaggccaagagcttggaaaattagcctcacaaaagcaaagatcaaacaaaccaaggacgagaacacgatg

SEQ ID NO: 47811 - DNA, 76 bp, Glycine max
  Clone ID: 701037640H1
gtggggtggtatagcttttttgttgtaatctgtcgtcagtttggtgataaatattagttggcagatgaattagaat

SEQ ID NO: 47812 - DNA, 86 bp, Glycine max
  Clone ID: 701037641H1
gcagaagatttctcccaattcgggatttcaaaagaggaaaaagataagcttgttggggaattgattaggtacatgcttttcaaaac

SEQ ID NO: 47813 - DNA, 94 bp, Glycine max
  Clone ID: 701037642H1
ccgcattgctctcagcttcacaacaccatggaccacgttagggaaacctctgcttggacccgtagccgctcctcccacgtcctcgttgactctg

SEQ ID NO: 47814 - DNA, 103 bp, Glycine max
  Clone ID: 701037643H1
gtagtgcggaagaaaagaaaaacgaaatccctcgctttgagaaatgggtgtattactcttccggtgggttctgccactgactctgttgctcacttgcgcgtta

SEQ ID NO: 47815 - DNA, 106 bp, Glycine max
  Clone ID: 701037645H1
ctctattcctatcacccttttaaataccgaaaatgcaccccgctactcagcacagaacgaagctgccatcgataacatatcacacttgagacagttatctttatct

SEQ ID NO: 47816 - DNA, 107 bp, Glycine max
  Clone ID: 701037646H1
cttccctggttcccatcatggacgaattagaagaaaccctactcacccaaatcgactgggaatcgttcctcgacgacatacctgaacttaacgtcgatgattttttg

SEQ ID NO: 47817 - DNA, 109 bp, Glycine max
  Clone ID: 701037647H1
tcaggatcgacaatcaggtgatgatgaagcaatggccttcgatgaaacattttgtacggctctagagtatggtttgccacctactggtggttgggcgttgggaattgat

SEQ ID NO: 47818 - DNA, 102 bp, Glycine max
  Clone ID: 701037648H1
ggttcaacaggtgagactcagattactccaacccatgtatctgatgaagaggcaaaccttttcgccatgcaactagccagtgcctcagtactccctatggtt

SEQ ID NO: 47819 - DNA, 103 bp, Glycine max
  Clone ID: 701037649H1
caaaaaatgggttcttcttcttctatgtggacggtgtgtgtgattttggcatcactggcctctgcagcactctgtgccaacccacggaggccagtggatgtac

SEQ ID NO: 47820 - DNA, 92 bp, Glycine max
  Clone ID: 701037650H1
aacatctaacaccacacacacgcaacacgcttcagccactattcttcaaggaaaaacaaaatgcaagacacaatggaaactcctacgacact

SEQ ID NO: 47821 - DNA, 108 bp, Glycine max
  Clone ID: 701037651H1
ataataataactccattttccctctgtcttccccccctcctctacacaaaaatattattagcatggagaaggtgaattttgtgaagaatggagagcttagattgcctc

SEQ ID NO: 47822 - DNA, 69 bp, Glycine max
  Clone ID: 701037654H1
acgacactcactcacacaccatggatttgctctcaatctctccctctcaccctttagctgcttccattc

SEQ ID NO: 47823 - DNA, 112 bp, Glycine max
  Clone ID: 701037622H1
ctttgtgaaaaaggggagtttcttattctttctagacgcttccaacgatcggcgatttcttagacatggcggagcatcacgaacacgaggaagtgaagggtgagtccttgtt

SEQ ID NO: 47824 - DNA, 76 bp, Glycine max
  Clone ID: 701037655H1
cgctcttgcaattagtcctcttccaacaatccgcacctaaactctagggttctgacatggacactggtggaaagat

SEQ ID NO: 47825 - DNA, 71 bp, Glycine max
  Clone ID: 701037656H1
cgcttcgtcttcgttgcgcttttgcgcaaaaccaattggatcactctcgtccgttaccgccgctggcctag

SEQ ID NO: 47826 - DNA, 106 bp, Glycine max
  Clone ID: 701037657H1
cttccctggttcccatcatggacgaattagaagaaaccctactcacccaaatcgactgggaatcgttcctcgacgacatacctgaacttaacgtcgatgatttttg

SEQ ID NO: 47827 - DNA, 81 bp, Glycine max
  Clone ID: 701037658H1
ctttagggactgcaaattctctgcttctctacacatggagccggtgtcgcgtgctaatttcttttcattccaaagattttg

SEQ ID NO: 47828 - DNA, 101 bp, Glycine max
  Clone ID: 701037660H1
ccgaacttctgatccgaaaactcccattccagaggctcgtcagagaaatcgctcaggatttcaaaaccgatctccgctttcagagcagcgccgtttcggct

SEQ ID NO: 47829 - DNA, 117 bp, Glycine max
  Clone ID: 701037661H1
accttcaaagcaggtggaccgttcaaattttacactggattccctgtctattgtgttaggattgctcctcacgtcatgatgacatggattttcctcaaccaggttcagaaattgcag

SEQ ID NO: 47830 - DNA, 93 bp, Glycine max
  Clone ID: 701037662H1
caacaatcctgatctcaacttttccctctctgtctccctctctctctcgatctctctctctctcttggtagcatatactatacacatatctag

SEQ ID NO: 47831 - DNA, 108 bp, Glycine max
  Clone ID: 701037663H1
caaagactaaagcagctgatggacccgagagcaaaaagatttctgctattgtgaaccatgataaaagcaagacagcagccctcccagaactgaaaatcagaacatccc

SEQ ID NO: 47832 - DNA, 106 bp, Glycine max
  Clone ID: 701037664H1
gtaaataatggactctccagacttttcagatctaggcgagtcctatcatattcatatgcatttgcattttatatgtttggagatgagctttttaaggatgacatga

SEQ ID NO: 47833 - DNA, 89 bp, Glycine max
  Clone ID: 701037666H1
gtctcagcctcgcgtgatgtttccttgctctttcatcttttcctctttctctatgcaaataaccgattgatcaatcgaatttctttgtg

SEQ ID NO: 47834 - DNA, 84 bp, Glycine max
  Clone ID: 701037667H1
ctggtacctgagaggtactcaattttggattatacatcctggctctggtttctagatgtcaaatctccttataatgcacactta

SEQ ID NO: 47835 - DNA, 94 bp, Glycine max
  Clone ID: 701037669H1
atgaatttcactacactgttcaggatggcatagatgccattgaggatgtgatctatcacattgaaacatatgatgtgaccacaattagagcaag

SEQ ID NO: 47836 - DNA, 92 bp, Glycine max
  Clone ID: 701037670H1
acgaaattgagtttaagatctgattgggcggcgacgatggagaacaacgacagtatcatatcgcgggagcagatcgaccagggcgccgtgtg

SEQ ID NO: 47837 - DNA, 104 bp, Glycine max
  Clone ID: 701037671H1
catatagacggcttcgaagttgccaccaggattcgaaagtttagaagtggaaaccggcctatgattgttcccttgactgcaagtgcagaagaagatttgtggga

SEQ ID NO: 47838 - DNA, 77 bp, Glycine max
  Clone ID: 701037672H1
cggcagtgaagtctcaaggttgacgcaaagaattgaattgaagtgataagtattatatagcatgcccagccaatggt

SEQ ID NO: 47839 - DNA, 101 bp, Glycine max
  Clone ID: 701037673H1
agcttctctctctgcttgctcctctctccttttcaattactctctctagcaaggagtgatggctgtgcaactgtgggaaaccctgaaggaaggcatcgtgg

SEQ ID NO: 47840 - DNA, 90 bp, Glycine max
  Clone ID: 701037677H1
caattatcaatggctcgccaaagcatttccattctcaacctcttaccagaacctgatgtcttcattcacacttcccatggaacacgcatt

SEQ ID NO: 47841 - DNA, 103 bp, Glycine max
  Clone ID: 701037678H1
ctcagaagaaaaaaaagtgagagatggagaactttcccgtgatcaacttggagaatctcaacggtgaggagaggaaggctacccttaaccagattgaagatgc

SEQ ID NO: 47842 - DNA, 104 bp, Glycine max
  Clone ID: 701037679H1
cgactctcttttctctctctgaactctgaagcaaaacaacattaccagagtggttctagtaattcagtgctgctagacgatggaaactagtgaatggcatatcg

SEQ ID NO: 47843 - DNA, 101 bp, Glycine max
  Clone ID: 701037680H1
atttcctccctctcttcgttttttgctctctcgaagtttgagagattcaggttcagatctgagcctattccgttttactcacactctcaaacaacaaaacc

SEQ ID NO: 47844 - DNA, 89 bp, Glycine max
  Clone ID: 701037681H1
cggctcgagctggcctctgttttgtttttaaaaaattgaaatccccactctctctcctccattctcgtcttcttctcccatctccattt

SEQ ID NO: 47845 - DNA, 95 bp, Glycine max
  Clone ID: 701037682H1
cgtgtctcaccgtgcgtgagtgtgtacaaacaccacgtttaaaaattgtgaatttggttaaaaaaaacacaacgtgcgtccttcaagcgagacgg

SEQ ID NO: 47846 - DNA, 101 bp, Glycine max
  Clone ID: 701037684H1
ctcttttatctctctcttgcaaaacctaattttcatgtcttccctcaaatttcaaaatgcgtgagatccttcacatccagggtgggcaatgcggcaaccag

SEQ ID NO: 47847 - DNA, 98 bp, Glycine max
  Clone ID: 701037685H1
gccgttgctctgcttcaaccttgcggaagaagaagacgcgccatggtgaagtactccagagaacccgacaatcccaccaagtcctgccatgccagagg

SEQ ID NO: 47848 - DNA, 92 bp, Glycine max
  Clone ID: 701037687H1
cgcttattctctcgcattccgtggagatctagtgcttctgctgcaagacctcgctgaaaattagggtttcgattcggaggtagacgaagatg

SEQ ID NO: 47849 - DNA, 81 bp, Glycine max
  Clone ID: 701037688H1
cacctatcaatttcgtaggtttgtacatcttttggtttggggcgaaagttcagccttttcagatttgcatcaatttcaaca

SEQ ID NO: 47850 - DNA, 264 bp, Glycine max
  Clone ID: 701037690H1
ctttcgtcagtttcgggggaagagatccagcagcaatggtgtacgtcaaggctcagaaatcaaaagcctacttcaagagatatcaagtcaagttcaagagaagaagagaggggaaaaaccgattaccgtgcaaggattcggttgattaatcaggacaagaacaattataacactccgaaataccgatttgtggttcgctttagcaacaaggacattgttgcacaaataatatctgctagcattgccggcgatttagtccttgct

SEQ ID NO: 47851 - DNA, 89 bp, Glycine max
  Clone ID: 701037691H1
gcttcaaatagtgattcttctgcagttggtggcaacaaccgattcaatcagagaacatctgagatgccacaacatttgcaaaatgtggt

SEQ ID NO: 47852 - DNA, 263 bp, Glycine max
  Clone ID: 701037571H1
cttcttcttcctgagctgtccattgcatcttcctctctcgctttcgctctcagctaacagtctaagaaattcaggtcaaaatggaagacgggcataagttccaggaagttccaaagccaaaatatgattgtcttttatttgatcttgatgacaccctttatccttatagttctggagtctcagtgcaaatagcaaaaaatattgatgagtttatgattcaaaagctggggatggaggctgccaaagttgccgaattgaactat

SEQ ID NO: 47853 - DNA, 265 bp, Glycine max
  Clone ID: 701037572H1
atttcttcagcacttatagtgtggtgagagagaaattaaggaagagctagcttaattgagtgctgctaattctatggctacccttgttgctccaaaccaaaaatctccggttgaagacgttgaggctctacataaggctttcaaaggatgggggaccgatgagaaaaccgttattgcaatactgggtcatagaaatgttcatcagaggcaacaaatcagaaaggtttatgaggaaatttaccaagaggacctcattaaacgcctg

SEQ ID NO: 47854 - DNA, 258 bp, Glycine max
  Clone ID: 701037574H1
ctcttatcctattatgagccagcaattgaatatttggctacttcaagaacccttccgcgacttattgatgttgtcaggagttctacaaaagagaaggtggttagagttgttgtcttgactcttaagaattttatgtcaaaagggacattgggtgctcagatggttgaccttcagctggcacaagttgtcctgagtttaaaagcacaagcatggagtgatgaggacttgttggaggccctgaattccttggaagaaggg

SEQ ID NO: 47855 - DNA, 261 bp, Glycine max
  Clone ID: 701037575H1
ctcggagccgctattatccccagacgccaccgccgcagcaccagaagaagaagaagagtgatgcctgagtacgacctaactccgcggatggcgccgaatctcgacaggcaccttgtgttccctctcctggagttcctgcaggagcggcagctctacgacgacgaccacatcctgaaggcgaagatcgaccttctcaacaacaccaacatggttgactacgctatggacatccacaagagcctctaccacaccgaggacgtc

SEQ ID NO: 47856 - DNA, 262 bp, Glycine max
  Clone ID: 701037576H1
ccataacgaggatgtttttcagccgcagaaaggtaatgttatattcgcatgcactttagatggttggcgatttgggattcgtgagttcgcggagatttatgcttctaagcttggggcgagtgtgaatgccttgctgagggcgttgtggggacagacgtattataaccctaagacgagagatgattgttgggaagaaaggggttggggggaataagaagcctatgtttgttcagtttgtgttggagcccttgtggcaggtgta

SEQ ID NO: 47857 - DNA, 267 bp, Glycine max
  Clone ID: 701037579H1
caaaagttcacccccaagcactaaattcctctaccacttgcaagcaagagacgtttaccctatggatgaaatctctggtactgaacggaaagggatgcaccgtgtttgattcaaatggccaaattgcataccgagttgataactacaactgcaggcatagagatgaagttcatctcatggatcaaaatggcgatattttgttcactatgctgaaaaagcaatataagttgtccaggttttgggagggttatagatttccagttccag

SEQ ID NO: 47858 - DNA, 143 bp, Glycine max
  Clone ID: 701037581H1
ttcatgttttgccttcaacaaattgcatgtatattctctattgttgccatgattgtgggaagcagtgaaattcaagaggcttctcagctgctgtcttgtttggctgactttgtgtactgcacggtctgtgcatgcatgcaggt

SEQ ID NO: 47859 - DNA, 263 bp, Glycine max
  Clone ID: 701037583H1
ctcattcacacattcacagttatactctctctctctttgtcgctaggatcactgatctcatctcaattttcagatatgtcgacatctgataagccagaagtggtggaaaggggtagcaaggatgaaaaacacaaggaagatgatcaagaggaggggaagggtggattcattgagaaggtgaaggatttcattcatgacattggtgagaagattgaggaagctattgggtttgggacgccaactgctgacgttactgcgattca

SEQ ID NO: 47860 - DNA, 264 bp, Glycine max
  Clone ID: 701037584H1
cttggtgctgtcatcttcatctcagtcgctctcaccacttatttcatctcgaaaaagaagaagaagaagaagaaggaatccaggaagaagaagaagggactggtggacgccataggcaacactcctttgattcggatcaacagcctctccgccgccactggttgccaaattctcggcaagtgcgagttcttaaaccccggaggcagcgtcaaagaccgcgttgctgttcaaattattcaagaggctctagaatctggccagcta

SEQ ID NO: 47861 - DNA, 264 bp, Glycine max
  Clone ID: 701037585H1
accaatctcatctcttcttctttatgttctctttccttcttttgttctctgccatggaagacgagccatttctcactaccacttcccaacccatcgccgatttccttcttccatcttccaagtccttcaacgacgtcaccaccacacgcgcgcgtgacgtcgccgccgccgccgaggagattcaatccgaacaacaacaacctcccaagaagaaaaaactgagccgctgcaagacagcacctgcgatggtcaccatgcgagacc

SEQ ID NO: 47862 - DNA, 252 bp, Glycine max
  Clone ID: 701037586H1
aagaaaacctatgttgcaaaaagaagtctttcacaagaagatgaaacgatccttgttgctaatggtcatcaacatgacatcccaaaagcagaccaagttttctttgaagaaggattaaggcctggcacaaaattggatgctcacttcaagaaaagagaaaatgtaaccccattgttgcctcgccaaattgcacaacatataccgttgtcatcagcaaagataaaagaactagttgagatgctttttgtgaac

SEQ ID NO: 47863 - DNA, 73 bp, Glycine max
  Clone ID: 701037587H1
ataatgtgttgtgttaatatatttcagccttgggggtaaaaaaaaaaaaacacaaaaaaaaacacaaaacaaa

SEQ ID NO: 47864 - DNA, 263 bp, Glycine max
  Clone ID: 701037588H1
ctctctcctcctcgatcccaattccactagggattcaattccgatgcgattccgagcttgttagatccacgacaacgtttcgtttcccagattcttttgtaaacaaaaataatcttcctttgcccaacaggtattggacactagttgaagaggggtcaatgggccatgtatgcatgtgaaaagaaatctatctagtaacactagaaacaggactagctgggaaaaggaaccactgtactgctcactgctatcttatactgagt

SEQ ID NO: 47865 - DNA, 187 bp, Glycine max
  Clone ID: 701037590H1
ggcgtaccaccaccgcgtcgctgcggcggtgcactcggtggggaaggtgccgttgggaattaagaggaaggggctccggatcgtggtgaccggcggcgcggggttcgttgggtcgcacctggtggatcggttgattgcgagaggggacagcgtgatcgtggtggacaatttcttcacgggaagaaaa

SEQ ID NO: 47866 - DNA, 139 bp, Glycine max
  Clone ID: 701037591H1
cccgatcgaaaccctaactcgcgatggcgatcttgctgggcgaaattcttcaatcgctggagctgtggctgaagctgatcaagaacccgcagcctcagccctacgtgaaccctaatctggaccccgttttgctggtgcc

SEQ ID NO: 47867 - DNA, 162 bp, Glycine max
  Clone ID: 701037593H1
tgctcttcgatgtatcaaagttgaagtaacacatcgtggaaacatgagaaggaaatatcgtatctctgggctgacttcacaggcaaccagagaattgacattcccagtagatgaaaggggaaccatgaaatctgttgtggagtacttctatgagacatatgg

SEQ ID NO: 47868 - DNA, 141 bp, Glycine max
  Clone ID: 701037595H1
ctttctttctctctctctctctctctctctgaagatggcttcacgcaggctcgtatcttctctgattcgatcctcccttcgtagatctcaatcgaagccctcaatttccgcatcgccatcgattcctacgtcatccaaccg

SEQ ID NO: 47869 - DNA, 79 bp, Glycine max
  Clone ID: 701037601H1
atcacctcactcctcgatcacgccaaccaacacagcatcgatctcgtacaaatcgaacccaccgaacacttacaacaac

SEQ ID NO: 47870 - DNA, 92 bp, Glycine max
  Clone ID: 701037602H1
cgctagcggcgcgagctggcctcatgtgtggttcgaaaggattgaaatccccagtcggtcgccttcattggcggcgtcctctcccatctcca

SEQ ID NO: 47871 - DNA, 58 bp, Glycine max
  Clone ID: 701037604H1
cagaaatatgtacataagcatggaataggtggctgactgtctttagttattcatgttg

SEQ ID NO: 47872 - DNA, 103 bp, Glycine max
  Clone ID: 701037605H1
gcatctcagaggccgattctttcgccgcttctctctttccttgtggtgttctcgtgttgctcgtaacaaaatgggtggaagtattgacgctttgaatgagggt

SEQ ID NO: 47873 - DNA, 114 bp, Glycine max
  Clone ID: 701037606H1
cagggttcgataagtctgatctgaagctggatgttttcatggttcagcacgacatggaaaacatgtacatgtgggttttcaaggagaggccggagaacgcgctgggtaagatgc

SEQ ID NO: 47874 - DNA, 63 bp, Glycine max
  Clone ID: 701037611H1
ctttgacttgtgtcatcaattatagcaaaaatgagaacccatttccactctctcccattgatt

SEQ ID NO: 47875 - DNA, 101 bp, Glycine max
  Clone ID: 701037612H1
caatatattccagtctctctgtgtatttccctacctctcccttcaagatgcagatcttcgtcaagaccctcaccggcaagaccatcatccttgaggtggga

SEQ ID NO: 47876 - DNA, 261 bp, Glycine max
  Clone ID: 701037570H1
ctccaacgtttggaactctcacccaaaaaactacggtcctggttctcgcacttgccgtgtgtgtgggaatccacatcgactgatcaggaagtatggccttatgtgctgcaggcagtgcttccgtagcaatgccaaggaaattggcttcatcaagtatcgctaaaagagcagttgtcaactacggaccaatattgtgttctggcactaggatgttttgaggatgttatgtttgaagaaacttgagactttcttttttcatct

SEQ ID NO: 47877 - DNA, 106 bp, Glycine max
  Clone ID: 701037613H1
cgacaggtagaacacagaatggtgctcatgcgaactgtgtacccaaccatcgctgttcctcttcctcttcctctttcaaaccttcccgttaggaccaatttcgccg

SEQ ID NO: 47878 - DNA, 111 bp, Glycine max
  Clone ID: 701037614H1
cggctcgagctctctctccctcactctcaccatggaggcgcaagcggcaagcccctcgactgcaccgccgcctctgtagccacacctcagctatcccgacttcggtggaat

SEQ ID NO: 47879 - DNA, 110 bp, Glycine max
  Clone ID: 701037616H1
cagcaagtacctttatgtattcctattattgggaattcttaactgtgaggcacaatatttcaatgccaacccatacgactatttacaactagccttaaggcggcctaatt

SEQ ID NO: 47880 - DNA, 111 bp, Glycine max
  Clone ID: 701037617H1
cactgacctacggttttcttatcattcctcttcccaattccagggtaagctttggatctccgatcggaggcttacccatcttttcttaatcttcaaggaacctttgggaca

SEQ ID NO: 47881 - DNA, 98 bp, Glycine max
  Clone ID: 701037618H1
cgggacgagaggagcgatgtgattctgctaaagtttcttagggcaagggatttcaaggtgaaggaggccttgaacatgataagaaacacggtgcgatg

SEQ ID NO: 47882 - DNA, 114 bp, Glycine max
  Clone ID: 701037619H1
tgaagaagagaaaagagagagaagggtaaggtaaccctagagtggtgaatcgaatctgcaaagatggaagctgtttctcgaagaagaggtcgaggcattttcgaaagcctctac

SEQ ID NO: 47883 - DNA, 111 bp, Glycine max
  Clone ID: 701037621H1
cacaatattcacaaatggatagacattgttttagccttaccaagaagagttcagcactatgtttaactcactggacacccatcaaacgtaagccagaacatccttgtgtgg

SEQ ID NO: 47884 - DNA, 264 bp, Glycine max
  Clone ID: 701037542H1
agaaactcaactttgagtagataatactgctggatgtctcgtctctaattattgtatttggaaaatagttttgagttgaggatctaatcattaccagatttaatatacttggcaaatggggtctgaaggtcctacgacaccgacaacaacaattcatgtgacaggatttaagaaattccatggagtttcagagaatccaacagacacaattgccaataatttgacggagtacatgaataagaagggtttgccaaagggtttagt

SEQ ID NO: 47885 - DNA, 266 bp, Glycine max
  Clone ID: 701037544H1
gaaagaaagaaagaaagaaagaaagcgagatcaaattgttggagaaacgcgaattaatccagaaatcaaagaaagcgttacttgacgttcgtttgaacatcgaaaacattaacacaaatggcaacacgaactggtcgcttgtttcaaaaccaaaacctcaatgtccacgttaatggaggaggagctgtttctgggaaggctgatttaaccggacagaggaaagttggggctgggggaagaaaaccacttggagatctatccaatgc

SEQ ID NO: 47886 - DNA, 268 bp, Glycine max
  Clone ID: 701037545H1
tcaaagctgcttgaccggactgttttgtccttgtgtattattcgggcgcaatgtagaaagattgaaggaagacactccttggactggaccatgcatttgtcatgccatttgtattgaaggtggcatttctctggcaatagcaactgcagctgcaacttccatctttcctgctattaacctggggactgtatgtctcattgttgagggtttattgtttacatggtggatgtgtggcattcacactggtcaagtgcgccaatccttacag

SEQ ID NO: 47887 - DNA, 268 bp, Glycine max
  Clone ID: 701037546H1
cggaaggtacctgcaaatcgcaaagaagaaagtccctctcattcctcttctgtctattctctgcttcatttccattttcttccttctctcccagttcaaatctacctccacctcccaccactcccttcccacgttccaaatcgagaaacacgaataccaccgcggttcctgcgactactccgacggaacatggatccacgacccctcgaggactccgaggtacgacaatacctgcaaggagatcttcaagggctggaactgcctctcc

SEQ ID NO: 47888 - DNA, 144 bp, Glycine max
  Clone ID: 701037547H1
ccgcttttctgctttcaaagtttctccagcagtggtcattaggtattgagtctattgaaactatttcaggagtgtggtgtgttgaataaggtgtgttgttttgaaagtatctcctgtgaggagtgctttttatctttgctgctg

SEQ ID NO: 47889 - DNA, 172 bp, Glycine max
  Clone ID: 701037548H1
tctccatctaatagtgttaatttgtctttctctatctctatcggtcatgggtgcttttgcttttgatgaggaaaactcctccaccgtggctccggcaacactctacaaagctctgacaaaagatgctgacactatcatcccaaagattattggggccatccaaactattgaa

SEQ ID NO: 47890 - DNA, 270 bp, Glycine max
  Clone ID: 701037549H1
atagattccccttttggcagccacaaagcaacaccctttctttttctctctaccctccaacgtgctctcttccctcctccacttcatccaaatctttctcattttctctcccaaatcacactctcaattacaataacacacactcaacttgagaattttccccaaaaatcccaagagctcgcgccatggtttccccggaaaacagcaattggctgttcgattagccgttgatcgacgacgacgttattcccgtcggcgactcctccttcg

SEQ ID NO: 47891 - DNA, 194 bp, Glycine max
  Clone ID: 701037550H1
tgacacgtataagtgtatgacattctctactacaactacttggtgtttcccataccgaacactcttcttcaatcaagcgaaggtggtctcgattgcaagtgatccacgatacactctacgcttcacaaaaccttcaaacccaattccacagaattcttctgcttcaccatgccaccaaagcctttagactatgg

SEQ ID NO: 47892 - DNA, 206 bp, Glycine max
  Clone ID: 701037551H1
tctcgagccggggcaaacaagtattgaattcctttcgtcccccagtggttttcttgttattcttcattgtcttttccgttgtctcctgtgatgaagcttccaagaccttcatacttcgcgtggattcccaatccaagcccaccgtcttccccacccattatcactggtacacctccgagttcgcccaggacaccagcatcctccac

SEQ ID NO: 47893 - DNA, 263 bp, Glycine max
  Clone ID: 701037552H1
atagtgttaatctgtctttctctatctctatcggtcatgggtgcttttgcttttgatgaggaaaactcctccaccgtggctccggcaacactctacaaagctctgacaaaagatgctgacactatcatcccaaagattattggggccatccaaactattgaaatcgttgaaggaaatggaggacccggaaccgtcaagaagataacagctagtgaaggtgaccaaaccagtttcgtgctgcaaaaagtggatgcaattgacga

SEQ ID NO: 47894 - DNA, 260 bp, Glycine max
  Clone ID: 701037553H1
cacaacaccaccattcttccattctctctctttcttctacactattcattcaccccatgccggtcaacgtgaggtgctgaaggtcaatcgtggtctttcgaaatggggaacgggagcagaagctactcggcgaaccggagcgactacaagcttctagaagaagtcggttacagcgccacggcaccgtctaccgtgcaatctacctcccctacaacgaggaggtcgccgtcaagtgcatggatctggatcgctgcaatata

SEQ ID NO: 47895 - DNA, 168 bp, Glycine max
  Clone ID: 701037554H1
tgggaaaacaaaaacaatctaagttatgccatttcaggctaaatagtctttgtttattgtaaacgtcaacatgtcatatagtagtaaagtatatttggcctgaaatggcagagcttagattgcgtctgtgaggggtataatgagccttagatggaaggagggaaggaa

SEQ ID NO: 47896 - DNA, 239 bp, Glycine max
  Clone ID: 701037555H1
gcaccttcgtaggacccttatctctctctctctcccgaattattgttcgttcgacccttttacttagtattccctgtttccggtattcgctccctttttttctgcattctggttttacttagatctctgtcccgcaccagatctggtgcagggtgagagggttgggttcattaattgtgtatcaatcttccttctgagcggtaggcgtggggataccagagtcttttcgggaagcaaga

SEQ ID NO: 47897 - DNA, 264 bp, Glycine max
  Clone ID: 701037556H1
gaatcgcaatcgcctcaggaattcaagttatcaaacaaaatgagaggcagaaagagttccaacttcaaatagatagctcaatgaaattaattgtagttctgctgtatttcatttttggtttacctttgtatcttcggaagcattacaattttatttgaaatgtaaaattttgtttttccatgtgctggacctttagacacattgttttgattcaggaaaagaatgaaaaatatctatagttagccaatatccctttctctccat

SEQ ID NO: 47898 - DNA, 259 bp, Glycine max
  Clone ID: 701037557H1
ccataatctctcttctcttcttctctttctatctgcaatacaaaaatgtctcacttcttgacgttcgggtcccccagacatttccgacacttactctcttctcgttctcaacatcaccttccgtaccaccgcctacgacctattccctctcttcgacaagtacgggaaggtcgtcgacatcttcatccccaaggatcgaacaacgggtgagtcaaggggttttccattcgtgcgttacaagtatgctgatgaggctcag

SEQ ID NO: 47899 - DNA, 265 bp, Glycine max
  Clone ID: 701037558H1
ttaactcttaagaactggttcaccaacgacgcctctgaatgtcagaaactatcagtgaagggggaagtgcagcttcagcctccagcggttatgcaaaaccctagtgattcggaccctttgctccataaccaggaggaggaggaggaggatgagtcaccgggaagctctggtgagatcaagaatgaggaagaagacgttgaggctggattactcccctgttgtcgaatttgcctcgaagagcgattccgacccagaggatgaattg

SEQ ID NO: 47900 - DNA, 265 bp, Glycine max
  Clone ID: 701037559H1
gtcacacataacgaaaactaaatcacaccaaaacatacctcaaaacctcaacacattcatacaataaccataaagcacaccaacaacaaattacaacttcaaataaaacagagcatctctctgctcttctctgttctgttctgttctgttctgtttctctctcctccccatatattcctcttcttcttcagaactcagaactcagaagggccacttcacttttagaaacccagttttgcatctgggtttttgcctgttgaagtgc

SEQ ID NO: 47901 - DNA, 167 bp, Glycine max
  Clone ID: 701037560H1
cttcattttcagttcatcttagggttcaattctcaatatcctcattccccgttccctcgcctttgcttcctagttcctactgtgacctgtgagtctccccttcccggcctcgccaacgggaaattcaacggattaattctcgtgtttcttcggagcgagcagaagga

SEQ ID NO: 47902 - DNA, 120 bp, Glycine max
  Clone ID: 701037561H1
gttttggagattcaaggcttaatttgtgttccttttctcttcaattaattttcccaagagaaaaatgcaaaccgaattgtagaggaaaatgagagacattgtttctgtcatggaaaacta

SEQ ID NO: 47903 - DNA, 155 bp, Glycine max
  Clone ID: 701037562H1
gctagacttagctattcttacctcttggcatgaccattcaaatgtcttctttactcttagcttctcttgctgtattctatttcttctcctccttggagaagagttttgcctttaaagcagcaagaaaggaggacacagcaagcagcaatcttcat

SEQ ID NO: 47904 - DNA, 121 bp, Glycine max
  Clone ID: 701037563H1
attgtttgttgtaggaagaggaatcttgagaaatggcaggggacagcaagagcaagattctgttcatcggagggactggttacatcggaaaattcatcgtggaagccagcgccaaagctgg

SEQ ID NO: 47905 - DNA, 170 bp, Glycine max
  Clone ID: 701037564H1
agaaaggcaaaggggatcgctgaaatcaattagtctggttgtagtgggaaaagaaaagaaaatgaaaatgggtggtgggtgcaagtgtttggtatcgttggtgttggctttggtgttgatgaggagtttggcggaggcgcaatcgggcaccagcaccacttgcgcccagg

SEQ ID NO: 47906 - DNA, 242 bp, Glycine max
  Clone ID: 701037565H1
cagacaatggaagcgagttgagagctacctcggttgaacatcatcgaatcgaataatcacttttacacatgacttatccttctattccgatttaagcccctaaacgaactatcgaagccacttcaaaaactactcttagattgcttcgatggtcgatcactacaacaagctggttaaactagcggcgagggctttctacgatgatctaacgagtaaaggagagaatcaacccaaatcgggaa

SEQ ID NO: 47907 - DNA, 267 bp, Glycine max
  Clone ID: 701037566H1
ctcattaattgcaagaatggcacttcgttgcttggtgatgtccctttctgttctcttcactcttggtcttgcgagagaaagccatgccagagacgaagatttttggcatgctgtttggccaaacactcccattccaagttcattgcgagatcttctaaagcctggccctgcaagtgttgaaatcgatgatcaccctatgcaaattgaagaaacacagtacccgaaaaccttcttctataaagaagaccttcatccaggcaaaacaat

SEQ ID NO: 47908 - DNA, 266 bp, Glycine max
  Clone ID: 701037567H1
agaatatgagcagcagtgcagggaagttggtgtgtgtcaccggtgctgccggttatattgcttcatggattgtcaagttcctacttgaacgtggttacactgtcagggccagtgttcgaaacccaaatgatcacacgaaggtagaacatttgctcaaaacttgaaggtgcaaaggagagactgcacctttttaaggcagatcttttgggtgaaaattcttttgactccattgttgagggctgtgatggcgtctttcatactgcttc

SEQ ID NO: 47909 - DNA, 261 bp, Glycine max
  Clone ID: 701037568H1
ccgagtacatagatgcgatgaggaaggctaatcctgacctcttatgggccatcgacaagaacaagagaggcatattttcgcatgcaattctcaatcgtagaaaagatgtcttccgactcataaaccgtgtcaatggacggaaggagatcatcaaatgtcgtgcagacgcgtttggcaacaacctcttgcacttggcagcatatttagggccttcatccgatctcgatcgtagatccggtgctgctcttcaattgcaaaggg

SEQ ID NO: 47910 - DNA, 244 bp, Glycine max
  Clone ID: 701037541H1
gtttcagtgagtgatcggtgttcacttgatccttcataagtcgtcatcatcatcatcatcatcaccgttgattgaagaagatgccgatcagaaacatcgccatcggaaggcctgaagaggctactcaccccgacacgttgaaggcggggttggctgagttcatctccaccttgatcttcgtgttcgccggttcaggttccggcatcgcctacaacaagctcaccgacaacggcgcgccactccc

SEQ ID NO: 47911 - DNA, 108 bp, Glycine max
  Clone ID: 701037569H1
cgactatagtgagcaatcctgtttgtggttcatcaatagaaggtgaggctaatggttccagtgatggtgcaaagaatatggcccccgtgaattctcaatcatctggag

SEQ ID NO: 47912 - DNA, 126 bp, Glycine max
  Clone ID: 701037496H1
caatttctctctttttgctcagtttctgttgtattttctcaattacgacatcgtattctgcaaattcaaaccgggtcttggttttctgaaagatgggacgtggcaaggacaagcatcatgatgaat

SEQ ID NO: 47913 - DNA, 200 bp, Glycine max
  Clone ID: 701037505H1
cagcgactccgtctcctcctctccactctccgaccacttccacgacgcgccgccccctgtccgcttcatgtgcagcttcggcggcaagatcctctcccgcccccacgacaaccagctccgctacgtcggcggcgacacccgcatcgtcgccgtctcccgctctatcactttctccgcccttattcttaaactctccaaac

SEQ ID NO: 47914 - DNA, 149 bp, Glycine max
  Clone ID: 701037506H1
tttggatttctatgataaaaaaaatacaagacagaaactggaatttcagcccatggaccttcaccattcagtttccttcttcttttttgccgggaatttgtttaattaggcaaaacttgcaaagttcatagttggaccctgtcaccgca

SEQ ID NO: 47915 - DNA, 269 bp, Glycine max
  Clone ID: 701037507H1
gaagaaaccaacacttgggggtgtctcagatgagaggaaatcagaatcaacttctagtgtagttaatgcatcagaacttccacctcatctccttcttgaaatgccagctttgtcaccgacaatgaaccaaggaaacattgctaaatggaggaaacaagagggagacaagattgaagtgggtgatatattatgtgagatagagacagacaaagctacacttgaatttgagagtcttgaagaggggtacctggctaagatacttgctccag

SEQ ID NO: 47916 - DNA, 268 bp, Glycine max
  Clone ID: 701037509H1
gaccgtgtcttcgtcgtagagagagagagagttcatatccaatctttggttgggtgggtgggcactaggtacaagttatagagatcgttagagtgagtgattgaaattcttgagacccacatcgtgtgtgtttgttttcattcctcggaggatattctaaagatggttgcgagaaccccaccaaagcagaagaagctgttggctgctctcaaccctgttctgattaaagaaacactcaacaaggtggatcagtgcgtggctcggctgc

SEQ ID NO: 47917 - DNA, 269 bp, Glycine max
  Clone ID: 701037510H1
cgaggagtttgttaactgtgtccgctgcattaaaatactttctcctcaagaagttcaacaaatcgagcttggatggagattttggcaatggtggccttccatatccagtaggcagcagctctgatggtgggaatgctttaatggcatccaggaatctgctaattattcttccatgttagtaacttacatcgtttttaggacatattcatcagtgtcgtccaaaaggttgtggggtcggtcggcagatgattttgtcctgctgcagcagc

SEQ ID NO: 47918 - DNA, 269 bp, Glycine max
  Clone ID: 701037511H1
atttcattggatacctgcatctaaaaccccaaacctccctcatttcttcttttccccaaccaacaactccactcctttgcgttcttgtaactcttctggctaaaatttcagcttccagaattgaaaaaaaaatgatcaaacaagttcttcttcttgttctgctcttcttggcctctggattggccctcctcagtctcagagtctgagtctgtttctcttctgcctcacgccgctgattccttcaatgttagctatatccagatgaagaa

SEQ ID NO: 47919 - DNA, 268 bp, Glycine max
  Clone ID: 701037512H1
ccgaaagcgccttcttgagatgggctataagaatcctgtcctcttgcttcatccacttggaggctacaccaaagctgatgatgtcccacttgattggcgaatgaagcaacatgagaaggtacttgaggatggtgttcttgatccagagacaactgtggtatccatattcccatctcccatgcactatgctggacccacggaggtgcagtggcatgcaaaggctaggatcaatgcaggggctaacttctatatcgttggtcgtgacccc

SEQ ID NO: 47920 - DNA, 270 bp, Glycine max
  Clone ID: 701037513H1
gcagaattcaatgcaaactatcaatcattctcctggttctaggatcataagcccaacaacaggcaatcatttacctggattagcttcaattttgcaaccacaagtatctaacgctgtaaaggctgctgctattggcaatgacttgggaaggagcagtcaaggagagcacatattttccggtatgaattcatcacacggagctacttttcagtcgcattcacttccagagcctatattcagccaatatcgtggagcattgtcctcaattgg

SEQ ID NO: 47921 - DNA, 237 bp, Glycine max
  Clone ID: 701037515H1
tggtcatgtctgattggacaagaagattcatatttggcagggattcaagtagagtttaatttgacaccttgtttctctcttgttaatttttgtacctaatgttagtgatatatgttgatggaacagcattttgctccattctcgattgggaacagtttgagaactgatattggattgtcattgagtgcttatgttgtttacagcttccattttgcatcaatatatgtggatttgaat

SEQ ID NO: 47922 - DNA, 270 bp, Glycine max
  Clone ID: 701037518H1
ctttatttactaataccacttcacctcactttgctttcattctccataccctatcaaactccactttccttttttcctctctttgtctctctctttctacctcacatcacacattctcatcctctttttatatccttcccctccaaagctgagagagccacaacacaaccaaaaccctatattattcacttggtcaaacactctttcacttgacaaacaaacacttcgtgtagctacaatggaagcgtattactacaagaggcaccatgt

SEQ ID NO: 47923 - DNA, 190 bp, Glycine max
  Clone ID: 701037519H1
cagaagcagaattcggtgacggagcgcggcgttggtccggagattgatgaagatcacacccgatctgctattgcgcttgatcatcatcatgatgaaaaggagagtgaagaaaacaacggaagccacatggtgtttgacgttgatcagggtttggatagaaaagatgacgaggcagagaagagttgtgatt

SEQ ID NO: 47924 - DNA, 213 bp, Glycine max
  Clone ID: 701037520H1
ctcgagctcgagcgtgcgtgggagggtccgaagttggagatagtgattctggttctgttctgtacttctttctactcacaacaacatcagaatcagaaacaacaatggccaacactaacttggaagatgttccctctctggatctcatgactgagctccttcgtcgtctcaagtgctcttccaaacctgacaagcgtcttattctcattggcc

SEQ ID NO: 47925 - DNA, 270 bp, Glycine max
  Clone ID: 701037522H1
cgccatcatctctccaccctccaccgccctcacacccttttaatatcctcactccccccaccacctcccactcttttcttttcacacccctcctcattcttcttcttcacactaattcagaatcaacatgaacccaaatgatgctaactctcctaagccgttggagattctgcagatgaaccctgttcctccgtttttgtccaacaccttcgacctcgtcgacgacccgactctcgaccccattatctcatggggctccaccggttttag

SEQ ID NO: 47926 - DNA, 194 bp, Glycine max
  Clone ID: 701037525H1
gttaactttcccctttgaaatcctttctgagttctgcgccaactgaatcaagcagatcgaactccgccatagtcttcatcgagacagagatcggaatctgattcccaaacggcaacagtatgagcgtcatcgacattctaacccgagtcgattccatttgcaagatactagacaaatacgacgtcgaaaagcac

SEQ ID NO: 47927 - DNA, 194 bp, Glycine max
  Clone ID: 701037526H1
gtttcggtcacagcagagcagagagtagtaagaagacactgcacagatctgagtggtgactgaaggaatctagcttctttcatttctcatcactattcttaggtctgagggctcattgccattatcatgtcaaggaggccagtaaatcccttcgcgatcggttcaggctgatcgcgtgcgaagtcatacccatt

SEQ ID NO: 47928 - DNA, 266 bp, Glycine max
  Clone ID: 701037527H1
ttaactcttaagaactgattcaccaacgacccctctgaatttcagaaactatcaatgaagggggaagtgcagcttcagcctccagcggttatgcaaaaccctagtgattcggaccctttgctccataaccaggaggaggaggaggaggatgagtcaccgggaagctctggtgagatcaagaatgaggaagaagacgttgaggctggattactcccctgttgtcgaatttgcctcgaaagcgattccgacccagaggatgaattgat

SEQ ID NO: 47929 - DNA, 269 bp, Glycine max
  Clone ID: 701037528H1
aagaaatccgtgatctccattttcttccttagcacctaacaaaacaaccaatctaacttgcaagacaccctagccctctctctctctctctttttaatcccactgaacttcttcacaactttgggatttgaattaacgagagccaacaaaactggagaaaggttttggaactttctgatccgggttttgcatctttccatcatcgccaccatttacttccattatatgttactttcactttattttatcttatatgcatcttagggtag

SEQ ID NO: 47930 - DNA, 194 bp, Glycine max
  Clone ID: 701037529H1
aggaggggaagaagggcgacctcctgctttggtttcagtggattcctcgaggcggagaatgtcagggcccattttaaatactttatcaagtgccaatgtcttgggtcagtcaagtggatcatctaggcgggctgctgtttctagtagccgtgatgcatttgttggtgctgagtcagatattcggactcgcactg

SEQ ID NO: 47931 - DNA, 193 bp, Glycine max
  unsure (1)..(193): unsure at all n locations
  Clone ID: 701037530H1
ccgaaatccncatctcccttcacttctgagctctggacgagatcccagatctcaccatctttcacgcactcttccatcagattcaccctttcgtttaacgcaaactcataacttgaaggttaatggctgctccaccggcaagggctcgtgccgattacgattatctcataaagcttctcttgatcggtgacag

SEQ ID NO: 47932 - DNA, 152 bp, Glycine max
  Clone ID: 701037533H1
cttttaccaagtgcaggttggattcagaatgcagcttccacagtatattgccgcatcattcttctgcctaatctgctcatccattatttactatggaaaagcagaggcgcatcaagttaatttctatgtgcacaataaatgtccctttccaa

SEQ ID NO: 47933 - DNA, 271 bp, Glycine max
  Clone ID: 701037534H1
ctgacgtggggtggtatagctttttttttaatctgttattagtatggttataaatattagttggaagattaattagaatctgtaattttttctttctttctttttttctcaaataatataataaactcgaaagcaacggctgagattggctttgagggttgacacgtcccttttatcttccacactcagttcccacctttccttctcagtcacacaaactcacaccatgttgtgtcaagtgtgaactcaaaacatatttctctctttcttt

SEQ ID NO: 47934 - DNA, 147 bp, Glycine max
  Clone ID: 701037536H1
cgtgaagaacaagaacgcttttgaagttagggacatgtagggtagggtagggaagagacaagacaacaaacatatagggaccaaacaaacaaccccttgcaaggccttcggccagggcaccctgcgtgctactactgtccagtgtca

SEQ ID NO: 47935 - DNA, 269 bp, Glycine max
  Clone ID: 701037537H1
cgaatatctcacgccgaagaccgtgcgttgaaatcttgcaaggacgagatccaagcatcgttgttttccttcccagaatttacgctcttcttactatcatcaagatacaaaatggaatatcgacggaccagtggtaggcaggaaaccggtggccgtgacagaagacaatctaaaagggaacaggcatatcaggactctcttattgaggatttgtcacaggattttcgtttgccaatcaaccacaggccaacagaaaatgttgatctgga

SEQ ID NO: 47936 - DNA, 267 bp, Glycine max
  Clone ID: 701037538H1
gaagcattacaaccataaggtggatgcctatagctttgctatagtgttgtgggaactcgtccataataagttaccttttgaaggcatgtctaatttacaggctgcatatgcagcggcatttaagaatacaaggccaagtgctgatgagcttcctgaagatttagctctgattgtgacctcttgttggaaagaggatccaaatgatcgacccaattttagtcagataatagagatgctgcttcgatatctaaccaccatttcaccgtc

SEQ ID NO: 47937 - DNA, 284 bp, Glycine max
  Clone ID: 701037494H1
gaagaaacctgagattggttgggtgaagctgaacgtggatggttcacgcgacccatacaaaagttcctccgctggttgtggtggtgttctgagggacgcatcagcaaagtggctccgtggctttgctaaaaaactgaaccctacttatgcagtgcaccagacagagttagaagccattctcacgggcttgaaggtggcttcagagatgaatgttaagaaactaattgtggagtcagacagtgactctgtggtgagcatggtggagaatggggttaagcccaatc

SEQ ID NO: 47938 - DNA, 266 bp, Glycine max
  Clone ID: 701037540H1
caactcaccaacacagttgcattattttctttccagatccaactcaaaattgcaatgggagtagaagatacagatatttgtatcatcaaggagccagatcatgttgtagtctattcagatggcatttcccatgattcaggtcatgaagctggaagtgatcatcacaatattacagagtcttatgaacaaatcaatgagactactgaacatcatagttcagaggagagtgcaaaggaatatgaggtgaaggaatgtacaacagaaat

SEQ ID NO: 47939 - DNA, 281 bp, Glycine max
  Clone ID: 701037454H1
gttgtttcccttcatctattttttcttcgcccccttttgtgtttctttttttggttgtttgttctttcttctcgttcgtcgctttgtgatctctctctgcaaccatgtccgccgagaaagagagagagacccaggtttacttggccaagcttgccgagcaggccgagagatacgaagaaatggttgagtgtatgaagaaagtagcaaaacttgatcttgatctaactgtggaagaaaggaacctcctctcagtgggatacaaaaatgtgattggtgcacga

SEQ ID NO: 47940 - DNA, 290 bp, Glycine max
  Clone ID: 701037455H1
aattcattctcatacattccttcttcttcttcttcttcttctttcacaatcacaatggcgcgagtggatctggatggtaaccccatcaagccacttacgatctgcatgatcggcgctggcgggttcatcgggtcgcacctctgcgagaagctcatgtccgaaacccctcacaccgtcctcgccctcgacgtctacagcgacaagatcaaacacctcctggatcccgccgattcccccctcccttgggctggccgcatcaccttccaccgcctcaacatcaaacacgactc

SEQ ID NO: 47941 - DNA, 165 bp, Glycine max
  Clone ID: 701037456H1
ctcatgagcaccatcctcatgcaaaggtcttcttctacttcactcgctgctgggaggttgttctccacaacaacagcagccattattgattccccttcacttgctcagagaatcagagatttgcctaaggacctccctggaaccaacatcaagaaacatgtttct

SEQ ID NO: 47942 - DNA, 153 bp, Glycine max
  Clone ID: 701037457H1
gagatttgatagcctcaactcaagtaagggttttctctttgagaaaatcgtatcttacaccttttggtgaccactttgagtgagagaagagaaattaagagagatactcaaattagattcaagagagatggccatcaaccatgaaacttgggc

SEQ ID NO: 47943 - DNA, 288 bp, Glycine max
  Clone ID: 701037458H1
agcagcttgaactcatttcaaatcgcagcctcttatggaccaactatggattacgttcacttggcaaaacaagttccttgtacatgaagcacaacacagagcatgaccctccatactggagaggtcctgtttggataaacatgaattacagaattctttcagcactccaccattactccaaagagaatgggccatatcaggagaaagctaaagccatctacaaagaattgagaagcaatttaattagaaatatagtgcgcaattatcgacagacgggatttttgtggg

SEQ ID NO: 47944 - DNA, 162 bp, Glycine max
  Clone ID: 701037459H1
cggaatcggctcgaggtacatgagaagaaacgagtttctgtgtccccatttccaatggtccaacctttgaacacaaacctgtccattttacccagaagcaccgaaaagaagaaagactgtgtgctgtacccgcgtaaaacaagacccttttgaaacgtttcg

SEQ ID NO: 47945 - DNA, 286 bp, Glycine max
  Clone ID: 701037460H1
aaagaaagaaagaaacaaagatcgttcattgctttgtagtcagatcagatcatcaaaaatggttttgtcttggtcaagaaggaacgttttccgccgtgccaagaaggagaagtcacaaactcaattggaagtggaggttgtgattcccaaccactttcactgcccggtgagtctggagctgatgacagacccagtgactttatcaaccggcatcacctacgaccgtgtgagcattgagaagtggatcgagggagggaacagaacctgccccgtcaccaaccaggtg

SEQ ID NO: 47946 - DNA, 149 bp, Glycine max
  Clone ID: 701037461H1
cttgagtatgaaaaaggacaggtactggagttgcaaaaaaagacagctgatttggaaacacatgttccagattgcagcctcaaaattgcaaagttagtggcacagctggagttggctgaagaacagcttaagatatcagatgatgaaat

SEQ ID NO: 47947 - DNA, 175 bp, Glycine max
  Clone ID: 701037462H1
ctccaggagtgctttgccttcattgattcactgtttgatgattgtcgatgaaggatccgttgtttcctaactgaatccgacaatatctatttttgcatcgttaatactgtctctcagtttgtcttaatttaagataaaatgcaatcagataatggcaagttatttatcggtggaa

SEQ ID NO: 47948 - DNA, 154 bp, Glycine max
  Clone ID: 701037463H1
tcatactcttgtgttgtgtgctactagtaatgaaatgaaattccacgcaaaactccacaaaagccaccttctttgattcaagaaatcaacaccgagttttcaaaatcccattttgttttcccttccttttttcctatataaaccaaccttttaa

SEQ ID NO: 47949 - DNA, 161 bp, Glycine max
  Clone ID: 701037464H1
tggaagcgtggtggtcttggttggcggttatgcccaagaacatcagatcagcaatggcaacctcttctttcttcttcaccttgctattactgcttctcactgtttcagatttgtttgtgcaaagccgtggccttaattttggaatcaactacgggcaaata

SEQ ID NO: 47950 - DNA, 173 bp, Glycine max
  Clone ID: 701037466H1
atcaagagggaaatcaaaatattacagaatctttgtggagggcctaatattgtacagttgcttgacattgttagagaccaacagtcgaagaccccaagtcttatatttgaatatgtcaataacactgattttaaagtgctctatcctacattgtcagactacgaaatacgata

SEQ ID NO: 47951 - DNA, 149 bp, Glycine max
  Clone ID: 701037467H1
tgttcttccttttgacacgcatagtgaaagacaatggttgacaatatgaagagaagtagctttgaagtgttgggaatgtgctgtgctacagaagaagcactggttgacagacttttgaagcctcttcgtggagtcaaagacgtctcagt

SEQ ID NO: 47952 - DNA, 147 bp, Glycine max
  Clone ID: 701037468H1
gccagcgtctctacgacaatctcctttctctctaactcataactcagatgagttccctctctaataactctagtagtagccacggcaattccttcctccagatgccccccatcaagtttaccaagctcttcatcaatggagatttcg

SEQ ID NO: 47953 - DNA, 198 bp, Glycine max
  Clone ID: 701037470H1
cttgtgtcaatgggtcaccaagcttgtggggcattagagctttggacatacccagagtggctcagagacctcgtaccacaaaacatagatggcacagataggcctgatcatgtggatctagctgctcttgaaatttatagagatagagagaggagtgtggctagatacaaccaattcaggagggcattactgttgata

SEQ ID NO: 47954 - DNA, 153 bp, Glycine max
  Clone ID: 701037471H1
cacaacacttcactcattaacttttcattctccgatacgccactcgcttcatatgcaagcacagcctgaatcctctatagatcgaaactgttaagtttcgacaaacttgacacaaggacaccatcaacatcttgaagagctcgctgtgttgtt

SEQ ID NO: 47955 - DNA, 149 bp, Glycine max
  Clone ID: 701037472H1
ctcgtctccgcacacacgacacgagggagaactcaacctcgtgagacgcatctcgcatggttcactcgctcgcacgctcgcacgccggacactttccggtgccgcacttccgtttcctgatctcgatcttggcggattcctccccatcg

SEQ ID NO: 47956 - DNA, 129 bp, Glycine max
  Clone ID: 701037473H1
caaaaaaaaagacaaaagaagacagaggaaagacaggagagctggaatcacatggacttgtctttctctttctgggtctccattaaatttttcttctctcccttctttctctctctctctctctgacca

SEQ ID NO: 47957 - DNA, 161 bp, Glycine max
  Clone ID: 701037475H1
atttgcttcttcgagtttcacagccaagtcgtaaaagggtttcaagggatggaaaacatgcagagcttctggcaattgggtgatgaactccgtgggcactcaaaagcatcggaggatcacaagtggttaatggttgcctcgaaactggccgaacagacaag

SEQ ID NO: 47958 - DNA, 282 bp, Glycine max
  Clone ID: 701037477H1
cctcactcagtttgaacccgaatcagagataaaccgcttatcgtgcggtcatctcttccacaaagtgtgcttggagaagtggctggactactggaacattacatgcccactttgccggactcccttgatgcccgaagatgacacaccttgctttcagtaagcaaaacaagtgagcatgccaataagagagagtttcatgtacagtgtagtgtacatattcttgagggttcttgatgttcacgcatctgagttctgccacctttttaagttttaacctttttg

SEQ ID NO: 47959 - DNA, 288 bp, Glycine max
  Clone ID: 701037478H1
ccgaaccctacttaggcatcttcaacacatggtcgggcaacgactgtcgccggagctggtacggcgttgcctgcgaccccaccaccggccacgtcaccgacgtcaacctccgcggcgagtcccaagacccaatgttccagaagcttggccgctccggctacatgaccgggaaaatatcgccggagatttgcaaccttagcaacctcacaaccctcatcgtcgccgactggaaggccgtctccggcgagatccccgcttgcgttgcctcactctacactctccaaatcc

SEQ ID NO: 47960 - DNA, 154 bp, Glycine max
  Clone ID: 701037480H1
cgttctccgattctctcgctgagaatcgttggtcgcacatcgctcacagcagcgccttcttccgacacaacaacctcaacctcaacctcgttgaagctcaaacgtcttgcacctggtctcgtggaattgtcatcgcccttgaagagcaaagaga

SEQ ID NO: 47961 - DNA, 194 bp, Glycine max
  Clone ID: 701037481H1
agagtggggtgaggggctgaaaggtgtgccaatgcaggtggtgtggtctgctgggtggtccgaagaatggagccgggagggtcaccgggttgcaagtgcccttccacaggccggttttcttacgcattctggaggccggtgggctcaggaggacgcagccgttgagatagctgaaaaaatttctcagtttgtat

SEQ ID NO: 47962 - DNA, 149 bp, Glycine max
  Clone ID: 701037482H1
gctttgctcttctagtctttttctctttaatttctctcaattactcatcatattcccctctttctgtagatatctacactgatatcatggagaacaaagccctctttaggcttcttgttattcttctggctcttttcttcgttgtattt

SEQ ID NO: 47963 - DNA, 118 bp, Glycine max
  Clone ID: 701037483H1
cgagagtactgatgcaagtgcgacgaggactgtctgtatcttttcttttcttaatagacagctgatattatagttgtatgaacgttaacatgataaatatattgtcaactccatttat

SEQ ID NO: 47964 - DNA, 126 bp, Glycine max
  Clone ID: 701037484H1
tacgtcaccatcagatgcacccaggccttctatagtttctaccttcttgtcaagctggaggttgatgtgtagggtaacttgaggagtgctaacaacaggcgagctactattgattgacaactacaa

SEQ ID NO: 47965 - DNA, 152 bp, Glycine max
  Clone ID: 701037452H1
gagaactgaagggtggtcatttccacagtattgtggagataactgaaaattcagggaaatgtcttctcaacgaatacatggtcgacgaaccatcttgttcaacaccaagaaagagactcttcaatttaccttgtgtttcatccatagaagaa

SEQ ID NO: 47966 - DNA, 127 bp, Glycine max
  Clone ID: 701037486H1
ggagagcagtgagtggctccatgtcattgattacactgtgaaactgctattgattgtatcattgctagtaactctgcgactttttcaaaaggtatggaagtctcgcatcagattgcaaatgcgtacc

SEQ ID NO: 47967 - DNA, 140 bp, Glycine max
  Clone ID: 701037488H1
gcagcaaagcttcaatttccgcttccttcaatttttgaacaagcttctcgcttccctagcttagcacctacatcacagatctttaacgataaaataaaaatggatccaaacgcggtgaagtccactctctccaatctggc

SEQ ID NO: 47968 - DNA, 192 bp, Glycine max
  Clone ID: 701037489H1
ctttgcacgtcaagcgtttttgacagtttcaggtcagcttcaagtcgagtcttatgcttgtgctctgagtagtgtgtatacctttggccccacatttcgcgcagagaattctcacacttccaggcatttggccgagttttggatggttgaacctgagattgcttttgcagagttgaaggatgatatgaactg

SEQ ID NO: 47969 - DNA, 196 bp, Glycine max
  Clone ID: 701037490H1
gccaaggacgaaacaagccgaagatgagcgaactcgagaattcagaaatatgaaaaagaagagaagtaaaactgaactcgataatctcgttgaactcaggacaaattgaatacttaatttctcttctctctagaaacgtatagacgaaacaatttctatgactatttctgcttctgcttcagatgcaaccttttag

SEQ ID NO: 47970 - DNA, 191 bp, Glycine max
  Clone ID: 701037491H1
ccgtttcaaaaaaaaaacttgtctctccattttgaatctggatccagcgccttctattcagcattcaccacccaaagccaaaccctatttctctttcttccctgtttggttctagccagcacaatgaggagaggagctaagagaaagaccaagcaggaccaagaagccaaacacgacgcacccgaagataa

SEQ ID NO: 47971 - DNA, 284 bp, Glycine max
  Clone ID: 701037493H1
cttgttctctacatctaacttctggttagttggtacgaagcgagggcgctatcacatcctaaatcgttcaagtcccagaaataccagctccataacccagtttcttcttggtgtctagggaaaaaggtaaaattttgaggctcaataaggaacattcgacatgttcaggtcatctcagcagaggaattcgagatgcaaagacttcaaggtgaaacatgctcttcaaatatgtgttcttcttggcgtttgtatctggatggcttatctagttcagcattctcgtg

SEQ ID NO: 47972 - DNA, 290 bp, Glycine max
  Clone ID: 701037412H1
gcttcttcgagtttcacagccaagtcgtaaaagggtttcaagggatggaaaacatgcagagcttctcgcaattgggtgatgaactccgtgggcactcaaaagcatcggaggatcacaagtggttaatggttgcctcgaaactggccgaacagacaagattgaagggggagcgtgtgaacaaccttgatctttcaaagggacccattgaaacaaggtcaagggataaatttgggttccaggaagagaacaaatttgattctcttaacttgagcatgttgaacctggactct

SEQ ID NO: 47973 - DNA, 156 bp, Glycine max
  Clone ID: 701037414H1
attgctcgtgtggcggctatcaactctgctgctgataatgatgaagatgatgagtgaaagttcattgcagattccatgtcatcgttgcacaactaaaactctcttattttgcgttcagtcaatcattttatttacatgtgctgtttattttctagg

SEQ ID NO: 47974 - DNA, 155 bp, Glycine max
  Clone ID: 701037415H1
gcttttcttggcaatggattccactctttcctattctcttccactgagtttcccaaaggcacggctagacttttcagttttcaccccctattaataacaaaccattacccccacccctcagaatcttcatcttcaactcagctactcctatttac

SEQ ID NO: 47975 - DNA, 160 bp, Glycine max
  Clone ID: 701037416H1
gtccatctctggataacaataacaccaattttctttcttcctcctcttttgaccaaacatgaaacccacggcaacattcttctttctccttccttcaacaacactcgttgtttgtctttgccttggaattggaacaaccaccctctttataaccctcctc

SEQ ID NO: 47976 - DNA, 169 bp, Glycine max
  Clone ID: 701037417H1
ttcggcactcgacacagacaaataatacacatatagcagagttagaagctgagcagctatcagaacatatccacaacacagctgagaagttcattttcaaaatggccggtggggtggttcctgtcgatgcatcaccgattggacatggcttcgttggcaagataacgct

SEQ ID NO: 47977 - DNA, 155 bp, Glycine max
  Clone ID: 701037418H1
cgaccacgacctcccactttcagatcacgagcctctctcacgtgtcgtccgcggggaagcctccgctttcgtcttcctctttcaagagaaagtgcagctctgagaatttaggttctggaaagtgcggtagctcctctagccgctgtcattgttcc

SEQ ID NO: 47978 - DNA, 156 bp, Glycine max
  Clone ID: 701037420H1
tgaaattatacggtgaattgagaagagttgaacatgttgatcattctcgcaaatcagctgaacaggctgtgaaggccatcaaagcagctgaggaaggaagaacagttgaggagtatgattaccttccatacttctattcccgttcatttgatctgt

SEQ ID NO: 47979 - DNA, 154 bp, Glycine max
  Clone ID: 701037421H1
cacttcgtccaggacgtcgtcctctcatccgacggtcagttcgcactctccggctcctgggacggcgagctccgcctctgggacctcgcggctggcacctctgaccgccgcttcgttggccacaccaaggacgtgctctccgtggcgttctcca

SEQ ID NO: 47980 - DNA, 134 bp, Glycine max
  Clone ID: 701037422H1
tgctgctattgctgcatctcaggcactggtattccaaaaagattcgcaaccaactctggcttcgacatctgctggtcgtgagaactggggagagaccaacatggctgatgctagccctaggactgatacttcaa

SEQ ID NO: 47981 - DNA, 131 bp, Glycine max
  Clone ID: 701037423H1
aaaagatggcgcggttgatcacagtggtgtggtgcgcggtggcggtgctactgtgcgccgcggcgggcgcgtcgtgggtggaggaggcggcgaacccgatacgaatggtggcgggggtggaggcggaggtg

SEQ ID NO: 47982 - DNA, 152 bp, Glycine max
  Clone ID: 701037424H1
cgagccgattcggctcgagtcaaggcttttaccataagcttacggagggtaccaataactcaattgacagtgttgggatcctgcagacaagtaacggcggaggatctgttgcgatgtctatcgataatagcagtgtcgggtccaatgattcc

SEQ ID NO: 47983 - DNA, 181 bp, Glycine max
  Clone ID: 701037425H1
gccgcagcagcaagtgatcgaagcgaaaagagagtaatcagcagagaaattcatcgtcgtagttatgggtaaagttcacggatcacttgcacgtgccggtaaggttagaggccaaaccccaaaagtggccaagcaggataagaagaagaagccacgtggccgcgctcacaagaggatgcag

SEQ ID NO: 47984 - DNA, 200 bp, Glycine max
  Clone ID: 701037426H1
tcgactttcaagctagattgaggtctgaggatagtgatctttgtcttcgccaacaacatcgtccacttaaaaataaaaaagccctgaaatatctgaacttaaaagccacacttttatttgttgtgtgtgaggtttgatttgatgggaaaatatcttgaatctgcggcgaggttggaagagctatcgcggattgtgtcatc

SEQ ID NO: 47985 - DNA, 288 bp, Glycine max
  Clone ID: 701037427H1
aaacgcctcttcaacaacccttgttttgttctgtgcaagtgatcttgaaaggaacaacaatggtgaagtctataaactttctcctgcttctgtctctactagcctttgttccctcctgtcactgcaaaaagaaaataggaggttacctctaccctcaattttacgacggttcatgccccagagctcaagagattgtccaatccatcgttgccaaggctgtggcaaaagaaccccgcatggctgcttcgttgctcagactacatttccatgattgtcttgtcaagggct

SEQ ID NO: 47986 - DNA, 206 bp, Glycine max
  Clone ID: 701037428H1
tcgacgcccttccttcgtcaacacccctttttgctgatggcgcaaattctgctccatgggactcttcatgccactatctatgaagtcgataagctcaaaattggtggaggcaactttttaaccaagatcgtacaaaacatcgaggagactgttggtattggaaaaggtgtcactaaactatatgcaaccattgatctagagaaggc

SEQ ID NO: 47987 - DNA, 154 bp, Glycine max
  Clone ID: 701037429H1
caagctgcatcaaggtgaagactggcatcacaacgagacagtcaagcactggacttataccatagatggtaaggttacaacatgtctggagagtattgaatccattgatgaacagagcaaaacaatcacctacaagctcttcagtggtgacatt

SEQ ID NO: 47988 - DNA, 153 bp, Glycine max
  Clone ID: 701037430H1
gttccgaaactgcctccaggagtcgttcgcggagattgaggaccagttgagtaaaaacaccaaagcggacttcaacactgtgttcagtgacgcttccttcaacttcatgttcaggttgttctgtgatggcaaagacccttcgcagaccaacct

SEQ ID NO: 47989 - DNA, 202 bp, Glycine max
  Clone ID: 701037431H1
gaagaaaacacctccccccaatttgcatcaatctagcaaaagtagacagaatgctaatctccaacttgttgaaacaaacaatgatgcaaagaggcacaattctaagacattgagatctttgaagtatgctgccaagaaatgtgtagctgttttttcattgattatctatggcaaaagaaaatcagcctcatatgttgttggc

SEQ ID NO: 47990 - DNA, 151 bp, Glycine max
  Clone ID: 701037433H1
caaaaatagtagtactattgtaacgttgtgacttgtagggagggaaatggagggaggtgacgttgggcattgggtgttggagttccttctccgggctcggtacccagtcgtttccagtaacctactcaagaaagtccttcgaatagtccca

SEQ ID NO: 47991 - DNA, 154 bp, Glycine max
  Clone ID: 701037434H1
gttcctcactctcttcatctgattgaacaaaatgtacacctcgaggaagaaaattcacaaggataaggatgccgagcccactgaatttgaggagacagttggacagtacttgttcgacttggagaacaccaatcaggatctgaaaagtgacttg

SEQ ID NO: 47992 - DNA, 151 bp, Glycine max
  Clone ID: 701037436H1
atcttcaggtattgtcttaagacctgctttcatatatggcaagaggagagtggatggttttgagcttcctttggatttggtaggggagccagcagaaaaaattctacgagcagtagagaacttcaccaaacctctaagctctcttcctgca

SEQ ID NO: 47993 - DNA, 177 bp, Glycine max
  Clone ID: 701037437H1
ttgttcgtttcactctcacaatggactccctctctctcttctgcaccggagcccttctcgccggcggcctctactggttcgtctgtgttctgggccccgccgagcagaagggcaaacgcgccaccgatctatccggcggctccatctccgccgagaaagtccaagacaactacaagc

SEQ ID NO: 47994 - DNA, 201 bp, Glycine max
  Clone ID: 701037438H1
cagttgaaagaaagaaaggaaggatgggagtgacaccgaaaattgctccttcgatgctctcttccgacttcgccaatttggcttccgaggctcagcgcatgctccacttcggcgccgattggctccacatggacatcatggatgggcattttgtccccaatttaactattggcgctccagttattgaaagtttgagaaagc

SEQ ID NO: 47995 - DNA, 212 bp, Glycine max
  Clone ID: 701037439H1
gcgacgcggaaacacgcgcatcttcacgatcctggaatccaccgcggcgtatccagcgattccgatctccgacgagtctgcgcaggcgaagaatcgcgaggccagccgccggtcaagaatcgcgcgatttgtctggaaatcgcgattcagccacgattcatccccgatactgagactcaaccacgattcaggaagaaaaacgagacaacctc

SEQ ID NO: 47996 - DNA, 155 bp, Glycine max
  Clone ID: 701037441H1
aacctttctctctcttttacacaaacctaagctataaaccagatcaaccttacctctctccacttcttactactgtgaagtttgagtttgtggtgtgcaagatatgaaggattttaccatttaaagagatcaacttgttaggtatatggagaaga

SEQ ID NO: 47997 - DNA, 175 bp, Glycine max
  Clone ID: 701037442H1
ctcagcttgaattgtggaaagagaagggttctgggaagtatgagaagaaggtgtatgtgttgcccaagcaccttgacgagaaagtggcttctctccaccttggccagcttggagctaggctcaccaagctttccaaagaccaagctgattacatcagtgtgcctgttgagggtcc

SEQ ID NO: 47998 - DNA, 202 bp, Glycine max
  Clone ID: 701037411H1
caatttcaacgccacaccaaaaattccactgcaccaccaccctccccatttgtacttttcttctcattctctttccactcccctgcattctgcacacaatctagctttacgtgcttctgggcaaccgcataaggttaaactgttaagcatatcattgaaatccttttgggattggacattgatatgatcatttgtattgggg

SEQ ID NO: 47999 - DNA, 221 bp, Glycine max
  Clone ID: 701037443H1
aattctacattcatctatcttggttctctctctcaatctaacgatttcgccattcaacagcgatctttccgtctccatcatcgtcatcaacgctcccatttcctaaacctcagagagggatccagctaacagttgtttcccgctgaaaagttgcttccccacagaactgtaaagcaaacggttagatgcaccaacacaagcaccactaacgaaccattggt

SEQ ID NO: 48000 - DNA, 152 bp, Glycine max
  Clone ID: 701037444H1
cccttctccgcctgtaaaactgcaaatcccatcaaaatcccaatctttagggtttccgtgtccaatccaaagacttcgtttatgaagatttagcgaaaagggttgaaattgatcatggatttgggaagcgaatccgtggaagagaatgaagt

SEQ ID NO: 48001 - DNA, 152 bp, Glycine max
  Clone ID: 701037445H1
aaacaagatacttgttggcaacaaggctgatatggatgaaagtaaaagcggtgtacctacctccaaagggcacagcattgctgatgtctctggtatcaagttctttgaaactagtgcaaaaaccaacatgaatgtggaagaggttttctttt

SEQ ID NO: 48002 - DNA, 154 bp, Glycine max
  Clone ID: 701037447H1
tcgagtttcacagcgaagtcgtaggagggtttcaaaagatggagaacatgcagagcttctggcaattgggcgatgaactccgtggacactcaaaagcatcggaggatcacaaatggttaatggttgcttcgaaattggcggaacagacaagatt

SEQ ID NO: 48003 - DNA, 153 bp, Glycine max
  unsure (1)..(153): unsure at all n locations
  Clone ID: 701037448H1
atattttgttgcgacctatggcctcagagncagaagctgctcttgctgccactccctctgatggtcccaccgtatttgacaagatcatcaataaggaaattccttctactgtggtctatgaggatgataaggtccttgcctttagggacatag

SEQ ID NO: 48004 - DNA, 153 bp, Glycine max
  Clone ID: 701037449H1
cggctcgagaaaacaatttcagatcttaccacagaattgaatgagcagcaaagtcagctgcagggaaagaaagaattggagttgtctttagaggaaaaagcagaagaatctgccaagatttcatctgaactcaattttttggagaagagcttg

SEQ ID NO: 48005 - DNA, 140 bp, Glycine max
  Clone ID: 701037450H1
ccaactttgagattgagccatctttcggggttgaggcttctgagttgtacccggatgtcaactacaccaccgtggaagaataccttggtcagttcgcttgagaatttaaaaggagaaagatgctcttgtgatcggatatt

SEQ ID NO: 48006 - DNA, 172 bp, Glycine max
  Clone ID: 701037451H1
caaagtggcatcgcttaggtacagatacagacacaacctggtaaaaatcccgaccccagtgccgcacaattttccttcactcgcagcggaggtttacttttgatctagtacctgctatccctatgtataagcatggacttctagcatactattgtttgattaaccaagttct

SEQ ID NO: 48007 - DNA, 259 bp, Glycine max
  Clone ID: 701037375H1
gttttgaacatgctcattctctgctggcaaatctatccttgttttgggaggagctggtggagttggaaactatgttattcagctagctaaacaagtttataaggcgtctaagatagcagcaactgctagcaccggcaaacttgaacttttaagggagttgggcgttgacttgcctattgattacacaaaggagaacgtcgaagaccttccagaaaaatacgatctagtgtatgatgtagtagggcaaggtgatagagca

SEQ ID NO: 48008 - DNA, 267 bp, Glycine max
  Clone ID: 701037376H1
tacaagcttcgtctcgtaaagaaaattcgaaagctcaatagagagaactcaattgaatcatcaaatgaggacagtgatttcgcgcttgatccattccacgccttccatttccaggctcaatgccacggtagtgtcaatcagcgggagaaatctctgcacagattctaacaaagttcctgggccattcaaagttgaagaagcagagactgtaaatgtgcctccactcccaacagaaaagttgcttgtgttgggagggcatgggttgtt

SEQ ID NO: 48009 - DNA, 274 bp, Glycine max
  Clone ID: 701037377H1
gaaaaagcaaaaacactgaatacaccaaaaatggccaaaagcaaaaactgtcatgctttgcctcttctccttgccctgatcctcttcttcactcttcttggaacctctcacgcaggtggcatagccatctactgggggcaaaatggtaacgagggcaccctctcagaagcatgtgcaacaggcaaatacacccacataaacatagcctttctcaacaaattcggcaatggccaaaccccagaaatgaacctggctggtcactgaaccccgcaac

SEQ ID NO: 48010 - DNA, 258 bp, Glycine max
  Clone ID: 701037379H1
gcgaaatttgcctcttgcaggagagaaatgattatagactaaagaggatgagaatttttgggggctatgatccttgttattccaattatgcagaagaatacttcaatagaaaagatgttcagtcatcttttcatgcagatactaaaagagacactaacgtagcatggaaggtgtgcaagtggccttaagatttggatttacagtggagatgcagatggaagaataccggtgatagggacacgatattgcgttgaggct

SEQ ID NO: 48011 - DNA, 249 bp, Glycine max
  Clone ID: 701037380H1
cgattgattaatttatggttggcctttgacttcattaattaatttatctgtctatatatcataatcataataatagcatgcgcttgtatggtctgaacttcggtcgttgacatgcaatggttcttaatataatatgtcgtggtgtcaactgtcgagtcatgaacaacaatatctgagattgtatacacctttcctccttaaacacaccgaaagaagtgagatcgtaatgtctatgaacccattttatgt

SEQ ID NO: 48012 - DNA, 162 bp, Glycine max
  Clone ID: 701037381H1
cgtttcttcctcttactcagtagtgcgattttcgattcgcttctctgcaactatgcctaagcctaaggacttcttcgacatgaccatcgcgggtcaacctgccggccgcatcgtgatcgagctctatgtcgacgtgactcccatcaccgctgagaacttccg

SEQ ID NO: 48013 - DNA, 272 bp, Glycine max
  Clone ID: 701037382H1
cgcctttcgaatcctctcaccagaggtacgattcgtaccatgtagttgtcggatttcggctttgccacttcttgattccaataattttggtttctttttttcccctaatttgatttccccagttagggtttttaactctattcgatcggcgatttcgaatactcggaggctcgaatcgtgttgggggttttccgttttgattaaaaaagtttccgtttttggtgttgggtgatcaagggttgtttgattttttcttgcgatcgagaagggtg

SEQ ID NO: 48014 - DNA, 275 bp, Glycine max
  Clone ID: 701037383H1
ctgcactaacactatagtgcttaccgagtcaactctgatccccatgatatcatggcggaagtttacaagaatgggccagttgaagttgcatttaccgtttatgaggattttgcttactacaaatcaggagtttacaaacacatcactggttatgaactaggtggtcatgcagtaaagctaattgggtggggaacaactgatgatggggaggactattggcttcttgcaaatcagtggaacagagaatggggagatgatggttactcaagatccga

SEQ ID NO: 48015 - DNA, 277 bp, Glycine max
  Clone ID: 701037384H1
cgctgcttcatcaaagacacagaagaaaccttttcttttcgattccgacaatgcgtccaccgcgtaagagggtggatttcgcgcgcgacgacaaggtggagatctgcggcaacgaggatggcttcctcggctcctactaccaagccacggtcgtgtcgcgcctcgacaacggcctctacgtcgtacgctcacgacacgctcctcgaagacgacgcatcacaacaaccccttaccgaaacccttttccccaaagaactccgtccccagcgccacgtgt

SEQ ID NO: 48016 - DNA, 222 bp, Glycine max
  Clone ID: 701037385H1
cttttggctgattccttcgaactctctctctctcacactttcctacactttctcgtcatccaaaccctaaataatggcgtcggaatccaccggagacgagaaatcatgggagcacatccttcgccgcatgctccccgacggcgcgccgcttgccgactaggagcacctcgattactccatcgccgtcgagtacgaacgtcctccggattcttacgacgttcc

SEQ ID NO: 48017 - DNA, 271 bp, Glycine max
  Clone ID: 701037386H1
caaccgactaattcgttatggcttccaaccaagaagcaacaatccctttgagatattgggtggataatgaacaaaagcgtgtagttatggcagaagcaagtggagactttgttgatgttctctttagtttcctgacccttccattgggaactatcatccggcttgggaaccaatttcaactaccggtacagattggtagcatcaacaatctgtacgagagtgtgcaaaatttgagccctgatgttttctggaacaacatctgccgaaaatg

SEQ ID NO: 48018 - DNA, 267 bp, Glycine max
  Clone ID: 701037388H1
caaaccctgaagaaagacacagccattgtttacttttcattgattgagccaaagctttgtattttctgcgataattttccattgggtggaagacagtctcaacctttattcgaaagagcaaggatctgagttgagttgagtgatcatgtgtggtggtgcgattatctccgacttcataccggcacgtcccgccagcggggcgcggcgcgtgaccgccgacatcctgtggccgagtttgaggaagcgctctcgaagccgctgtggacg

SEQ ID NO: 48019 - DNA, 269 bp, Glycine max
  Clone ID: 701037389H1
ggcctaactggtgcaggtggagactttggttctggtttgacccaattgatcttcttttcaacctcaaggttttctacttccactggtctctcccttatgggtgtcatgattgtgtgttgcactcttcctgtgactcttgttcacttccctcagtggggtagcatgttcctccctccttcaaaggatgtcaacaagtccactgaggaatactattacaccgctgagtggaacgaggaagagaagctaaaagggttgcaccgaatagtctc

SEQ ID NO: 48020 - DNA, 268 bp, Glycine max
  Clone ID: 701037390H1
caagaacttgaaacaaagatttacgaagttgttctagtggagaaacaatagtaaaaccagaaaaagaacaagatgttccggctgtaagtgaaagacaaaatgtaactgaacctgccaaagctgctccgctaggattgggtgtgggtggtttagagcgcaagaggagaactagacttcaacctcctgtaagtaaaggtgctgatgatagatcatccagttcttctgccaatcaaaatcagcaaaccagaacagatggtcgcatatattg

SEQ ID NO: 48021 - DNA, 268 bp, Glycine max
  Clone ID: 701037391H1
cctttgttcactcttcttctcttgcggctagggttttagcgcagttcttctagatttaaggaagatgggtaaggaaaaggttcacatcagtattgtggtcattggccatgtcgactctgggaaatccactaccactggtcacctgacttacaagcttggaggcattgacaagcgtgttattgagaggtttgagaaggaagctgctgagatgaacaagaggtctttcaagtatgcctgggtgctggacaaacttaaggcgagcgtgaaa

SEQ ID NO: 48022 - DNA, 262 bp, Glycine max
  Clone ID: 701037392H1
ggccgcgtcagaaggtatattttgagtccgaggatgtgtatgcttgtattgtcacatgtggaggtctttgtcctggtgtcaatacagtgatcacggaaatagtttgtgggttataccatatgtatggggtgcacaaagtactgggaatagagggagggtatagaggtttttattcttgcaatactattccattgacgccaaaggttgtgaatgacatccacaaacgtggtggaaccatccttggtcactctcaaggagagga

SEQ ID NO: 48023 - DNA, 271 bp, Glycine max
  Clone ID: 701037394H1
acagatagaaagaaaagaaatttcaccgtaccagagaacaaggaaggatagaagaaagtgaaagaaaatggcgttgtacatggacgaagaagagatttggaagtgtccgaagcatccatcaaagagaagaagaagcggaatttgccctacttgccttcgagaccgtctcgtaactctttgccctgactgtgctaacgtgcgctcctgttcctgctacgcaaccagctcctcctcctcttcctcgtcttcctctccttatcggtttttctgg

SEQ ID NO: 48024 - DNA, 262 bp, Glycine max
  Clone ID: 701037395H1
gctctcaggaccatcaaccttctaaggagaagagtccttggattgatgagattgaccagtttccagtcgatgttcctagggtatcttccatttaaacaatgaattttttaaatatttgtgtatcactatcagcattaggtggtagctgttggactggtgaaattatcctgcaaagttgttgtaatacattgctaatttcggagtactgtaggattttatttttaggacacaacttagaatgcatgcagttcataagatgttt

SEQ ID NO: 48025 - DNA, 215 bp, Glycine max
  Clone ID: 701037396H1
ggaccattggccaatcgtgaacctggaagagcctttttggatactgctactagttcttagtctgtcttttaatttggaaatactagacttttggataacattagttttgcaagagtgaatttgagttattttgtcagcacattccatttacttaaattttgtttgcgaacctcttcgatttggttattttaatgttatattctggtatgatgcac

SEQ ID NO: 48026 - DNA, 179 bp, Glycine max
  Clone ID: 701037403H1
gcaaagaaagaaagaaagaaaaccctagcttaccttttcaactttcaagatgcaaatcttcgttaagacactcactggtaagacaatcacccttgaggtggagagttcagataccatagataatgtaaagtccaagattcaagacaaggaagggatcccaccagaccagcaacgtctca

SEQ ID NO: 48027 - DNA, 158 bp, Glycine max
  Clone ID: 701037404H1
tcggtggtaagtgtaagctgccagatggtaagtgtaagctgccggatggtatttgtacatttgagcattggaagtgaggcagtgcctgaaggaattattgctagaatatctaacttggaaatgcagcccttatgggactctggtaaagataatagtat

SEQ ID NO: 48028 - DNA, 150 bp, Glycine max
  Clone ID: 701037406H1
ccaccagctcctaagaagccatactactaccattctccaccagctccagtccaccaccacccttacccccatcttgactcgcaggcacaccctgatcctccagcagctcctaagaagccatactaatatcattcgccgccaggtccagtg

SEQ ID NO: 48029 - DNA, 206 bp, Glycine max
  Clone ID: 701037407H1
attccctgcaattaacataagcataacccctttccaacctttctcctcttcagatcggatcagatcagatccaccgccatggatttcatgaaggtcttcgatcaaaccgttcgagaaataaagagagaggtgaatctgaaggtgctcaagattccggaaatcgaacagaaggtgctggatgctactgataatgaaccttggggtcc

SEQ ID NO: 48030 - DNA, 196 bp, Glycine max
  Clone ID: 701037408H1
taggaggaccctcagtatttgagacagcccacggaacaagcgcttggggacttcttgagaaaaatcctgaatattttagtctcttcaatgaggctatggcaagtgattcccgaatagtagacttggcactcaaaaattgcacttcagtttttgaggggctagattccatggtggatgttggtggtggaactggaac

SEQ ID NO: 48031 - DNA, 159 bp, Glycine max
  Clone ID: 701037410H1
tggtgttactgtttattgttgctagtgtttgtcttgagtctctcaactctcataagacgtccctctttggagtcccatggttgctctctcttccgcggagttcaaccactgctccaacggcctctttctctctcttcccttcctctctcctcagaccca

SEQ ID NO: 48032 - DNA, 271 bp, Glycine max
  Clone ID: 701037374H1
ctcacacactcattcggtgctccgaatctcagattctagggttagggttcccaatttctccaccgatcagaaaatgagttcaactggtggttctaccaagggcggaaggggcaagcccaaagcctccaaatccgtttcaagatcgcagaaagctggtctccaattccccgttggaagaatcgctcgattccttaaggctgggaaatacgccgagcgtgttggtgctggtgctcctgtgtacctctctgcagtgctcgaatactcgctgctg

SEQ ID NO: 48033 - DNA, 285 bp, Glycine max
  Clone ID: 701037349H1
cgaccttgaacgcttcccatcttggtgagtaacacgaatctgaggaaaaaaaatgtcgattatgcaactttacgggcgcagaagagcgtggtgaagcggtcgaagaagtacttggaagaagcagtttacatgaagctcttcaaagatggaagctcccagctcatcgttcgccagagcctcaacaacttcgtcaagagccgaaagcgcgtttaccaatgggaggtaggcgacacgctcaagaagcttcgcgatcgcaagctctatcaaaccgctcttaactatcag

SEQ ID NO: 48034 - DNA, 279 bp, Glycine max
  Clone ID: 701037350H1
gttggaaagaaaccctagcaagcggaacaatggcagacgttgaggtcgatgtggcggctgcagcagcagcagggcagccgaagaagagaacgttcaagaagttcagtttcaggggcgtggatctcgatgcgcttctggacatgtccaccgatgaactcgtgaagatgttcagtgctcgcgcacgtagacaggttccagagaggcctcaccagaaagcccatggcctcgatcaagaagcttcgcaaagcgaaaagagaagctccaccaggtgagaaccag

SEQ ID NO: 48035 - DNA, 279 bp, Glycine max
  Clone ID: 701037351H1
ctgctttttcccacactctgctatggcttcagagtcgccgcgcaccctcacttggcttcgactcgctctctcaatcgctgattccactcgttatctcgtcctcgataagttcagatggccatggaggttactcaaatccttttacacgcgcaagcagtcgatggcacattcatgcaacaagccgaagaaagcttgaaaccatttcaggaacagaatcttccaagtttcttgttttctcttactggggcaatcagcaatgacgacaagcctgagagaatc

SEQ ID NO: 48036 - DNA, 273 bp, Glycine max
  Clone ID: 701037353H1
tagaaactgaggacttagctagtagttagagatgcctgagttttgcgtgacaggtggtactgggttcatcgcatcttacctggtcaaggccttactagagaagggtcacacagtgaggaccaccgtgagaaacccaggggatgtggagaaggttggttttctgactgaactaagtggagccaaagagagactgaagattttgaaagcagatctattagtggaaggcagctttgatgacgcagtgagaggagttgatggtgtctttcattggcg

SEQ ID NO: 48037 - DNA, 277 bp, Glycine max
  Clone ID: 701037354H1
tcagtgagtgatcggtgttcacttgatccttcataagtcgtcatcatcatcatcatcatcaccgttgattgaagaagatgccgatcagaaacatcgccatcggaaggcctgaagaggctactcaccccgacacgttgaaggcggggttggctgagttcatctccaccttgatcttcgtgttcgccggttcaggttccggcatcgcctacaacaagctcaccgacaacggcgccgccactcccgccggcctcatctccgcttccatcgccatgctttc

SEQ ID NO: 48038 - DNA, 275 bp, Glycine max
  Clone ID: 701037355H1
ctaggatttgctaatgatctcacttatacatcttcaaaaccgaagtcggcatttattgatggagaacaacatttatctgatgataattctgttcatggttcacctgtgaatgcaaatgggaagcaagaaaattctgctaatggtgattatacagttgaggatgaatcctatgcacacagtgaagatgacctggcaagaagcccccatagtctagctgggaggagtacggtggagagtccttctcaagacttttcaaattctcattttggaaaaag

SEQ ID NO: 48039 - DNA, 276 bp, Glycine max
  Clone ID: 701037356H1
caaacacagctcaacaactgtgtctgcccaaaagtcatgttgatgttcttcttcttctccttgttcgcctccacttttcactgaacacttattactcactccttcatggccacttcgctctctttctccatttctcccaaaaccactgccacaacctcagccttccgattcaaagtctccgccatggctaccaccatcgccgccccttctaccaaggtggctcccgccgtcattgtcggcggcggaagagtgggtagggccttgcaggcatgggca

SEQ ID NO: 48040 - DNA, 266 bp, Glycine max
  Clone ID: 701037357H1
tggccagaatcgcacttggaagaaccgagaggccactcagccagactgcattcaggccctcatcgttgaattcatagccaacttcctctttgtctttgttggcgttgcttcttccatggtcgttgaccagcttggtggggatgcactagttggattggttgctgtggccgtggcacatgcacttgtggtggctgtaatgatctccgccgctcacatttctggtggccactcaaccccgccgtcaccttgagctcttgccgtggtca

SEQ ID NO: 48041 - DNA, 274 bp, Glycine max
  Clone ID: 701037358H1
cgaagcgagatctcctagacagcgagtttctcttttctctctctctttcaattttcacatagtcagcgaaaacaaacaaactattggagatttggagcacgaaacacaacacaagcagcagccacctcgtttcattgttttgaattcaactgagaaaaacgacaacgaggatgtttcaggagagcagcgtgacgctgtggccgactcagtggactcgctaccacgacaagctattcgagcgggcccttctggtcgtgccggagatctgccggac

SEQ ID NO: 48042 - DNA, 271 bp, Glycine max
  Clone ID: 701037359H1
ggccatatcacactctgttagcatatggagaagaacactccattgttgacattgagaagagaagagaagcaggagaatgcaatgggggctttgtacatgtcagttatggagatactcttgttcctcctcatattcatatgctctctcacaccaatctcacagtcacagggattacatcaatctcccccttttctctttggcacttcttcttcttcgtaccagtatgacggagcttatttgagtgatggcaaagggataagcactgggatgt

SEQ ID NO: 48043 - DNA, 266 bp, Glycine max
  Clone ID: 701037360H1
gtaaggaagaaggcaagaactggttattacaaccttcaacggaaccggcgttggatttggtttcggcgtaggttgcggtttcggtataggatggggtttcggaggtctgtgccttactttcgaatcgtttttgacatttctctaccttttgcacatttaattttagtacgcaattttgatactccactcgttgatcttagaattatgagtcttttatccctgctgtttaatagcaatctttttaagctgttgcattcatttattat

SEQ ID NO: 48044 - DNA, 274 bp, Glycine max
  Clone ID: 701037361H1
caaaagaataaataaaagcggaagagagggtaggctgttacggtttggtttggtggttatttgattggtgtgcatccatgttaagctagtggcgatcggatccagctacagcctacaacctacagttttggtttggtttgcttgattgaagatcaaggaaggacagatgttgggtgttataaggcacaagagtattcgccccgccttctccgcaatcagacacttctcttctgcagctaaagagattactgtccaggatgctctcaactcgcac

SEQ ID NO: 48045 - DNA, 260 bp, Glycine max
  Clone ID: 701037362H1
ctttcttctgcgcttcttctctggtctctggcttccttggtacgggaagaactcaatcttgtccatttccctttggtttttctctcttcgatctcttcaccttccattcgaccaccctcttatcacagctcgcgttaacttaagccctctccgttgagggtttctccaggtgtggtttgattttcagtttctgatgctgaagaaataaaaaagcttgaaggctttgctcttctgtgtgaacactgttggaaggtggtgcg

SEQ ID NO: 48046 - DNA, 249 bp, Glycine max
  Clone ID: 701037363H1
taggggatgacagagggaggatgacgggcggtgaggagcgatcgacagggattcgaaagaagggaagcggagtgagacaatggctggtcctggacggcagatgagacacggatgtcgtggacgccgggaagcacgccatcatgaggaggacgggactccccgcgcgtgacctgcgtatattggaccctctcttgtcatacccttctacccttctcagtcgtgagatggccatcgtcatcacttggagca

SEQ ID NO: 48047 - DNA, 273 bp, Glycine max
  Clone ID: 701037365H1
agaaaacgcaacacattagacgagtacatttctaaaattcagaagacgtaatgccctttcgacctcttctagagccaccttaacattttccattcaataattaaattatcatcattattataataaactttacctataaacgcatccatgccttccccttcagttcgcagactcacaatggccgcaatatccaactccttatcactgaagcacagtttctctctgagtcgagctctccttcttcctctccatcaattcaattcagagatgtag

SEQ ID NO: 48048 - DNA, 281 bp, Glycine max
  Clone ID: 701037366H1
aaaccctaaaactctgtgtcctccgccgttcacatcattgtcgacgttcgttcagttgctcacactctcaacagagaagagaagagagatgagaggaaggagctatagtccatcgcctcctcctccacgttacagcagaagaggaggagggaggagtcccagccctaggggccgctatcctccccgtccccgacaacaagatctccctaccagccttcttgttcgtaaccttcgtcatgactgtaggcctgaggatcttcgcagaccttttggtcaatttg

SEQ ID NO: 48049 - DNA, 275 bp, Glycine max
  Clone ID: 701037367H1
atttctcaatcatctctcttttttctcttcccaccttccccacaaagtccttcctccccttttgctttaacaagagtggtaataaatatttattatttttcaaattttaacaacaatgccataattaaataataatttaaaaaaatcattcatttatttatataatagcttaattgggttctctttttgtaactattctccttgctcctcttgttcttcttcctccttttactccttcaacaacacaatcatttcattttttgtatatttgggac

SEQ ID NO: 48050 - DNA, 278 bp, Glycine max
  Clone ID: 701037368H1
cttctatttatgaggaaaataaagacgatgatggttttctttacatgacttacagtggagagaacactttcggttctcgctagggtcaaatttaataatatatgagatcctctgtaaatagatgctgcaagatgtaaactttctgctgtcgatagtcgatgcctatcctgtttattgcttatggtttacgtatctattgagcagatattttgctgctttgattatgtgcattctcttcaaattatggatttcaatatatgaatttagattttatgctc

SEQ ID NO: 48051 - DNA, 277 bp, Glycine max
  Clone ID: 701037369H1
gaaggagatagtgaaagagcttcttcctctaattcgagtgtacaaggatggcagcgtggagcgtcttctaagctctgaaaacgtggcagcctcccctgaagatccccaaactggagtctcatccaaagacatagtcatcgcagacaacccctacgtctccgctcgcattttccttcccaaatcccaccacactaacaacaaactccccatcttcctctacttccacggtggcgccttttgcgtcgaatccgccttctcctttttcgtcaccgctatc

SEQ ID NO: 48052 - DNA, 273 bp, Glycine max
  Clone ID: 701037370H1
gtgttagtggcagtagcactactcccttattgtgctctttgttctttatttcttccttactttttgcttcctgcacccatgcctcctcccaggcacctcctccaattgtggatggactttcatgggatttctataggacgagctgtcccatgcttgaagggatagtgagcaagcatctccagaaggtgttcaagaaggacaatggtcaagctcctgccttactcaggatcttcttccatgactgctttgttcagggttgcgatggtcgatatt

SEQ ID NO: 48053 - DNA, 276 bp, Glycine max
  Clone ID: 701037371H1
ctttctctctctcattctcttctccatcgcgcgtaagaaacacatacttagttgctactaatgggaactgttgaagctgcaaacaaggatgcaaatggaagtctcctagagaaaaatccttcagttgtttttgtgttaggtggcccaggaagtggaaagggtacccaatgtgcaaatattgtccaaaattttgggtatactcatctcagcgctggtgatcttctgcgagcagaaatcaaatctggttctgaaaatggtacaatgatcagaatatga

SEQ ID NO: 48054 - DNA, 276 bp, Glycine max
  Clone ID: 701037372H1
gaatggcacttcgttgcttggtgatgtccctttctgttctcttcactcttggtcttgcgagagaaagccatgccagagacgaagatttttggcatgctgtttggccaaacactcccattccaagttcattgcgagatcttctaaagcctggccctgcaagtgttgaaatcgatgatcaccctatgcaaattgaagaaacacagtacccgaaaaccttcctctataaagaagaccttcatccaggcaaaacaatgatagtacaattagcaagcctcc

SEQ ID NO: 48055 - DNA, 263 bp, Glycine max
  Clone ID: 701037348H1
tctgagcgctgctttggtctggtctctcagctctgatagattggcaccgattctgggtatgagccaaaaaagctttcttttgtttcctctgtttttcttttcggcaaagtagaagatatttgtgattttcttctgtgaattgaattcgagtcgttgcttctggcttcggtgcttgctgtattgttggcacaagttattggtccaattgaaatgaaagagtttgagtgacaaggagacttagactgtgtggtctggccatggag

SEQ ID NO: 48056 - DNA, 285 bp, Glycine max
  Clone ID: 701037321H1
gttaacaggaacatcttaacttctctctcaatcctcaatccttatcactcccctccccctctctcccatcaccactattttcaccaaaagactgtgaaactccctcacttctttagccatgccccagaactgcatagcaccaaaaccagaatactgcaatagtactcatcactctgtggacgaaccaccagagatgaccgagccacatgactcaactgttatttcctatcccatgcaaaccaatgaacaacaacaacaaccgttcccaaaactcatatgtacccc

SEQ ID NO: 48057 - DNA, 281 bp, Glycine max
  Clone ID: 701037323H1
caaagtacgatgggattgtttgtgttcatggagatgggatcttggtcgagtaggttgtaaatggactgcttcagaggcaggactgggacactgcaattaagatgccccttggagtagttcctgcaggtacgggaaatggcatggcaaagtctcttcttgattcagttggtgatccttgtacagtacccaatgctgttcttgccatcatacgaggccgtaagcgaaaacttgatgtggccaccatcacacaaggggagaccagatttttcaggtgttgatgc

SEQ ID NO: 48058 - DNA, 279 bp, Glycine max
  Clone ID: 701037324H1
ctcacactcactgcagatctcaatccatggctaccattgttagcatcaaggcccgccagatctttgacagtcgtggcaatccaaccgtcgaggtggatttgacatgctccgatggtacttttgctagagctgctgttccaagtggtgcatccactgggatttatgaggcccttgaattgagagatggaggatctgactaccttggaaagggtgtatcaaaggctgttgacaatgtgaacaccattattgcccctgctttggttggcaaggaccaactca

SEQ ID NO: 48059 - DNA, 279 bp, Glycine max
  Clone ID: 701037325H1
gaggcttctgaacagtttctgacacgaaattcagccacaaagttgaccatcttgggatggatgagaatatcatcatgttccaccatttccccacattgatccaacaaggagattccaacaattgaaaactccttatcatctttctcttgcaacatcgtttcgcggttcctttgccgtgatttcaattgttgcataagaaaacatcactcactagttctttcctctcctttttcattcaatttctctgattgacacaattgccgcccagtcagtgattga

SEQ ID NO: 48060 - DNA, 266 bp, Glycine max
  Clone ID: 701037326H1
ccgctcgagccgctcgagcggatcgagctcccttcaacaaaacacaggggaagggaaagtagtcagtagtagcagtagtaacgtacgaaacaccatacatgagtttcttgttaccattaccaaccctcttgttgtgtctccttgttgtgttaatttattccctgcaatcaaaggccgatgaatttgatttcgatgagtccttgttcaatgcaaaaaccgcttccagtggcagataacttgccggaagatgcaacttgttccgtggg

SEQ ID NO: 48061 - DNA, 255 bp, Glycine max
  Clone ID: 701037328H1
tgagaattgagagtagtgcggtttgccggtgagatctgttgtttaagttagtgctgtaatgtcatgctattgctatctcatagatttagatctaaaatctcccttcttcattgctgaacgcggttaaggctatgttatgaatgcgttctaattaagacacaataatgacaaggcaacaagcaagttccacgagacgtggcggtctttcaggagtcttgcattccaaatccacatcttctcctctactctccatat

SEQ ID NO: 48062 - DNA, 259 bp, Glycine max
  Clone ID: 701037329H1
cgaccgagggttctggatcaatttgaccttaaagcttgggtctatggctcacaagattttgatgttgctgctcttacaaaagcgattcttaaggcacttcggtccttagcagcagaagaaaaagacttgaatctgctccaacttgaattgaagcaaagactgatgggacagaactttttgcttgtcgtagatgatgtttggcacgaacactattggagttgggaggcactataaattcccttcatttatggatcttcag

SEQ ID NO: 48063 - DNA, 278 bp, Glycine max
  Clone ID: 701037330H1
tccgaacgaaacaatcatggcagcgaacccacccgcgccttcagaatccgacccgaaccaaaacccgggttcggagtcctttccgtacttcgaagacatgaacgaactcgagacagtcttcaaccgcttcgacgccaacggcgacggcaagatctccgccgacgaactcgacagcgtcctccggtcgctcggatccggcgtctctcccgaggaactccgccgcttcatggaagacctcgacaccgaccgtgacggcttcatcagcctcacgagttcgc

SEQ ID NO: 48064 - DNA, 291 bp, Glycine max
  unsure (1)..(291): unsure at all n locations
  Clone ID: 701037333H1
ctgctataaaaaacccagtgaatggtatgcagaaatcactcccaccgaagaatcatccatccattccaaaacagattgtagaacaaagaatttcgaagcacagtgttgaacaaagaattccaaagcagagtgttgaacaaagatttccaaagcagagtgttgaacaaagaattcaaaagcagagtgttgaacaaagaattcaaaagcagagtgtggaacaaaganaagacatacgagaactatatagacctaaaatggcaccanaacaaccagtggcatcatcaaaccaca

SEQ ID NO: 48065 - DNA, 286 bp, Glycine max
  Clone ID: 701037334H1
gccaacggactctccggtggatggggaaccttggaggaggggctacccagctcatcatgccccttgtgttctccctcatccgcgacattggcgctaccaaattcaccgcttggaggattgcattctttgtccctgccatgttccaaatgctcacagcattctcaattctgatatttggtcaggacatgcctgatgggaacttccgccgcttgaagaagtcaggggaaaaagccaaagatgatttttcaagagtcttatatcacggtgttacaaacataggggatgg

SEQ ID NO: 48066 - DNA, 284 bp, Glycine max
  Clone ID: 701037335H1
ctcactgcaacggcgccggagatccgtcgctctcctcctccaccaccaccgcgatgggcgccaattccatgctcgccgagttctctcacgatctcgacgaccagatctcccagctcatgcagtgcaagccactctccgagcaacaggtccgaggtttatgtgagaaggctaaggagattttaacggatgaaagtaatgttcagcctgttaaaagccctgtgacaatttgtggcgatattcatgggcagtttcatgatcttgctgaactgtttcgattggaggga

SEQ ID NO: 48067 - DNA, 282 bp, Glycine max
  Clone ID: 701037336H1
atctatatttatccacacacaacacacaacacacacctttgcctctgctccgcataactcctcacacacacacacaaaacagaacacaacacatacacatacacatgttgttgatgagtggaggcaacaaaaaacacagatccatcacacacatgaacaattgatctttgtcctttgtatataatttgattctaatttttggcactaagagagccactcaaggctctgggatgtactatacgccattcggggttctgattttcggcggagagaggttcaaga

SEQ ID NO: 48068 - DNA, 280 bp, Glycine max
  Clone ID: 701037337H1
ttttatttgcatgtgaaggacaaattcagaaagtatacataatagagatggtggccatgatggagaggttgcaaattcaaatcagaaaaatagtgagttatggttgtatttttcagttactgatgtgtaattatatccccattgtctggtaaagtggtaatacccagtgtgtaattctttgggaaatgcttttttttttattttttttccttttgaattcagaggacatgtcaaaagtacttggttcatgtggtcaacatgagggagggtaatcctccta

SEQ ID NO: 48069 - DNA, 280 bp, Glycine max
  Clone ID: 701037338H1
ctgacggttatccattcttacttttatctcaggaatcattggatgcactaaacgagcttctaaaggaacgcatacctattaatcgtttcagacccaatatccttgttgaaggttgtgatccatattctgaggacttgtggacagagatcaagataagcaggttttcatttcttggtgtcaaactgtgctcccgttgtaaggtacctacaatcaatcaagagactgggatagctggatctgagccaactgagactcttatgaaaactaggctggcaaagtc

SEQ ID NO: 48070 - DNA, 280 bp, Glycine max
  Clone ID: 701037339H1
cgcaacaaaaagaaagaatcccaggcgaggagaaagatggaggggaaggagcaggatgtgtcgttgggagcgaacaagttccccgagagacagccaattgggacggcggcgcagagccaagacgacggcaaggactaccaggagccggcgccggcgccgctggttgacccgacggagtttacgtcatggtcgttttacagagcagggatagcagagtttgtggccacttttctgtttctctacatcactgtcttaaccgttatgggagtcccggggctaa

SEQ ID NO: 48071 - DNA, 279 bp, Glycine max
  Clone ID: 701037340H1
cagaaacctgctctcaagttcttgatctatggcagaacaggttggattgggggtttgctggggaagttgtgtgaaaagcaaggaattccctatgaatatggaaaaggacgcctggaggaccgatcatcacttgtggctgatattcagaatgtgaagccaacacacatttttaatgcagctggagtaactggcagacccaatgtcgattggtgtgaatctcataagacggaaaccattcgcaccaacgttgctgggactttaacattggcgatgtcagca

SEQ ID NO: 48072 - DNA, 277 bp, Glycine max
  Clone ID: 701037341H1
tgatgatggagatggattccatgtgtatgtgggtggtccttgtggccattgctggtgctcttttagtcctaagatctatgctcaagaatgtaaattggtggctctatgaatccaaattgggtgtgaaacagtactctttgcccccaggtgacatgggatggcccttcattggcaacatgtggtccttcctcagagctttcaagtccaaggaccctgattccttcatctcctcctttgtctccagatatggaagaactggaatgtacagaccttgatg

SEQ ID NO: 48073 - DNA, 271 bp, Glycine max
  Clone ID: 701037343H1
caaattctacggttcgttgggggatcgagaatgaccagctcagcggttacggaacaatttgacaaatgcatgaagaagcaagtagaagcaattgcacgagttttgcatttatttcaatcctacaaagaggacaatattccgtgcaaaatcgacgagggtctctatttgggttcgattgccactgcagctaacaagcctgctttgaaagactgtaatattactcacattttgactgtggctggtagaataccactgcacatctaagattttg

SEQ ID NO: 48074 - DNA, 277 bp, Glycine max
  Clone ID: 701037345H1
catgaccctagttctgttggatctgcatatagtaaccctttattgattcgcaaagatgaaggtcacagtggtttctcggagtggaagagaagtggttcaaggtggcattgagctcagtgattctgctactatagcagatctgcaggaggcaattcataagcgcaccaagaagtacccatcaaggcagcgcttgacacttccagtccaacctggatcaaaggaaagggctgttgtccttaattacaaaaagagtctgaaagactatacaagtggaatc

SEQ ID NO: 48075 - DNA, 271 bp, Glycine max
  Clone ID: 701037346H1
tgtcacacctttatctctctctttctttcttcaaattcaacttgcaattccaattcctggggagttggttccattttccgaagaaccatctcaaatccaccgccacataatgtacctgtatgcgaatgcgaatgtgaacgcggtttcgatttagatccagattcatggggatttgctttagcattgaagaccaaaaccacctttccatctccgattccaacgcgaagcctaaacctgcagtaggtcatgaatctggcgctccattggctcc

SEQ ID NO: 48076 - DNA, 254 bp, Glycine max
  Clone ID: 701037347H1
aatttattatctttctctaagaactcttccaattttttctctctcttcctctttagcttcatcgccatggcatcaccagcaagaaccttctttgccttcattctcgccgtcgtcgctctcttcttcgccgccgccaatgctcaagacctctccccggctccgagtcccgatgccggagcggcgggatccgtttcgagctccgtcgccatgatcggagcttcggttgtgctgtcattgatggctatcttgaagca

SEQ ID NO: 48077 - DNA, 282 bp, Glycine max
  Clone ID: 701037320H1
agcgaaggtttaatgtgaggctttggaaagcctttaccgactgttttaactgccttcctgtggcagcccttatagatgaaaaaatattgtgcatgcatggtggtctttcccctgaactcacaaacttggatgacatcaggaatctacctcgtcctactgcaattcccgacactggcttgctttgtgatttgctttggtctgatcctggtagggatgtgaagggttggggtatgaatgacagaggagtgtcctacacctttggccctgatatgtcgctgaatt

SEQ ID NO: 48078 - DNA, 264 bp, Glycine max
  Clone ID: 701037291H1
caactatgttttcgtgggtgtcatcagtgctactgttttcttccaaatcataatagttgagtacttgggaacctttgcaaacacaacacctctcaccctggcacagtggttcttttgcttgttggttggatttttcggcatgccaattgctgctcgcctaaagaagatccctgtttgaagcacctgaatggataaaaagcagtagttggttaccgttagttgttgcattgcttcaaggtccattatgcctttacattcactaac

SEQ ID NO: 48079 - DNA, 270 bp, Glycine max
  Clone ID: 701037292H1
caaattgtcaaattcacattactctctcttcactctttctccgtcatgactacggaaccagacgttgaatccaagtatgcccacaacggcaaggtcatggtgggcaccgccattctcctcttcattctcataataatcattattttcttccacacctacgtccgcccctgccgccgtcgccgccgcttctctcattcgcttccgaccaattcctccgccgccgcctctctcgacgacccgtgcctcgacccttccatcatcaagtccctt

SEQ ID NO: 48080 - DNA, 269 bp, Glycine max
  Clone ID: 701037293H1
cggtcgaggcatctgttccttctagtggacctaatgccaatcctttagatctctttccccagggccttccaaatgttgggtctggtgctgctggtgctggctctttagactttcttcgcaacagtcaacagttccaagccttacgcgctatggtacaggctaatccacaaatattgcagcctatgctacaagagcttggcaaacaaaatcctcatcttatgcgattgattcaagagcatcaagttgacttccttcgcctaattaatgaa

SEQ ID NO: 48081 - DNA, 270 bp, Glycine max
  Clone ID: 701037294H1
ctcgagccgtcttgcattgggaaaggctaaagaagaaattgatatgcaaattggcaaagatgaatatatacgtgagtcagatataagcaaacttgtgtatcttcaagctatagttaaagagacactaagattgtatccaccagcccctttttcatcacctcgtgaattcacagagaattgcatcctaggtggataccacatcaaaaagggaactcgacttatccataacttgtggaagatccacagggaccctagtgtttggtcagaccc

SEQ ID NO: 48082 - DNA, 269 bp, Glycine max
  Clone ID: 701037295H1
cgttgctctgcttcaaccttgcggaagaagaagacgcgccatggtgaagtactccagagaacccgacaatcccaccaagtcctgcaaggccagaggcgctgaccttagagtgcatttcaagaacactagggagactgcctttgccatcaggaagttgcccctggttaaagctacaagatacctggaggatgttttggcccacaaacaggccatccctttccgacgcttctgtggtggtgttgggaggacagcccaggctaagagcagac

SEQ ID NO: 48083 - DNA, 278 bp, Glycine max
  Clone ID: 701037296H1
cttaactccaaacgaagaaaaaagactgagagcaattgcatcaacaacaaattgaaaggatgtcgatcttcgagtacaacggaagcgccgtcgtggctatggtcggcaagaactgcttcgccattgccagcgaccgaagactcgcgttcagctccaaaccatagccacggatttccaacgcatttccaagattcacgacaagctcttcatcgctctctctggcctcgccaccgatgctcaaacattgtatcagcgtcttgttttccggcacaaactgt

SEQ ID NO: 48084 - DNA, 270 bp, Glycine max
  Clone ID: 701037301H1
acacgcctcttcaacaagccttgattcgttctgtgcaagtgctcttgaaaggtacaagaatggtgaagtctataaactttctccagcttctgtctctactagcctttgttccctcctgtcactgctaaaagaaaataggcggctacctctaacctcaattgtacgacggttcatgcaccagcagtcaagagcttgtccaatccatcgatgccaaggctgtggcactagagacccgcatggctgcttcgttgctcagactacatttccatg

SEQ ID NO: 48085 - DNA, 292 bp, Glycine max
  Clone ID: 701037302H1
cctccgtaaattattcatagcatatttcaaaccacactcaaaaggcttccctccctgacttggatttgattgatttcattacattgctacactatattctttttattggtgaattgctatttgctacactatattttaaggacaattatacatagactatatggggttgatggctgcgaaccaaactcaattgttgtctaagatggccatcggagatggacatggtgaagcatccccatattttgatggatggcaggcttatgatgaaaacccctttcatccaaagagaatc

SEQ ID NO: 48086 - DNA, 272 bp, Glycine max
  Clone ID: 701037304H1
ctcaacacgtcaaaaattcatctcatctatctgtagatcggagaaaccaaaaaaaaaaaatggagttcgacgagaagaaagcaatgatccgcgacgtggcgttacaagtcgttttcatctcgctcacgattttcagcttcctctggatgcacggcatccctcaaaacctctacgccaagctccgccaccgtcccccgaacccacgggccgtgcaagccaagcgccatttcgtcaaaggcgcgcagtcctcgcccaagccagaagatccaaaa

SEQ ID NO: 48087 - DNA, 168 bp, Glycine max
  Clone ID: 701037305H1
gccgtttctgaagggaccaaggcggttaccaagtttaccagctcttgaattagggtttgttaggcggttgtgttgcagatctagggttttctgtggatttcttttcttaaaaattagtttgtagatgtaatgatctgaacagttgttaatggaaggtttcgtttgaat

SEQ ID NO: 48088 - DNA, 280 bp, Glycine max
  Clone ID: 701037306H1
gtgtactactccatgtatgggcatgttgagaaactagcagaagaaataaagaaaggggcttcctctgtggaaggtgttgaggccaagttatggcaggtacctgagacactgctggatgaggtgcttggtaagatgagtgcaccacccaagagtgacgtaccagtcattacccccaatgaactatccgaggctgatggctttgtattcggcttcccaacaaggtttggcatgatggctgctcagtttaaagcctttctagatgctactggaggctttggag

SEQ ID NO: 48089 - DNA, 283 bp, Glycine max
  Clone ID: 701037307H1
cgggatccgtgattttgattcatctgtacttgtagagcctttttctactgcaaagggatggatgacaagtgctaactaagcactttcttcttcttcttcttcatcccttcatcgccaaacacaatgaaggaattgggcgtggttgcacatcctcttttcaatagagttcttggacgttatcgtctacactgtaagcaaagcagccatgaagaagggcatgaatgactttgtctttgtcatgtactccaatgccttcgcaacttgcctcctccttccataacct

SEQ ID NO: 48090 - DNA, 281 bp, Glycine max
  Clone ID: 701037308H1
cgcaacaaaaagaaagaatcccaggcgaggagaaagatggaggggaaggagcaggatgtgtcgttgggagcgaacacgttccccgagagacagccaattgggacggcggcgcagagccaagacgacggcaaggactaccaggagccggcgccggcgccgctggttgacccgacggagtttacgtcatggtcgttttacagagcagggatagcagagtttgtggccacttttctgtttctctacatcactgtcttaaccgttatgggagtcgccgggctaag

SEQ ID NO: 48091 - DNA, 281 bp, Glycine max
  Clone ID: 701037309H1
ctgacacggggaggtagtgacaataaataacaataccgggctcattgagtctggtaattggaatgagtacaatctaaatcccttaacgaggatccattggagggcaagtctggtgccagcagccgcggtaattccagctccaatagcgtatatttaagttgttgcagttaaaaagctcgtagttggaccttgggttgggtcgatcggtccgcctccggtgtgcaccggtcggctcgtcacttctgccggcgatgcgctcctgtccttaactgccgggtcgt

SEQ ID NO: 48092 - DNA, 281 bp, Glycine max
  Clone ID: 701037310H1
ctctctctgtttcgctttcaccgaagaataacttgactttcccgcactccacctgagaaaaagatacccttaattcgcaggcgcgtcttgtgttggacaacaaccacaagatgattaacttcgaagaaaccgagtcgcgactcggcctccctggcaacgactcagcactcaagggaagtgctgccaagagaggcttctctgaaactgcttctgttgatttgaagcttaatctttcttcttgcatcaacgactctgcctcggattcaccctctctgtgtcta

SEQ ID NO: 48093 - DNA, 264 bp, Glycine max
  Clone ID: 701037311H1
gcaaaattctcttccgtttcaggattagcgtttcaccgttacagtgaaacatggcaaaaccaaagcgaatctctctgcgtatctttgcgctgctcctcttgatttccacctcttcgtttcaccttctccgcgcttccgatgacgccgatgatgatgcgatcttctatgattcgttcgacgaggattttgaagaccgttgggttgtgtctcagaaagatgagtacagtggtgtctggcaacatgccaagagtgagggacatgatg

SEQ ID NO: 48094 - DNA, 270 bp, Glycine max
  Clone ID: 701037312H1
gcagacaccaagcttctctccacgcccttcttgggtaatctgaagtgcagcgatggcggatggattgcactcgcggcatccatcagtagttcagaagttatctggacagtcttatttgttgtctaggcttgcccctactcactcaagaaactattccacaactggtagttacttcaatggaggcttgcagtcttcgggtttggttccagtcatggcacatgcaccggctgagaaaggagtgtctggacttctgttcgatttcatgatggg

SEQ ID NO: 48095 - DNA, 278 bp, Glycine max
  Clone ID: 701037313H1
cgaagagaaggccacgaaaaacagaaaacccagaaaaactctgaagaagagttcgttgctttctgcttcactgcgaagatgaacggaggcccatctggtttcacaaatgctcccgtcacaagggctttcatcatcacttcggcgcttttcacaatcttctttgggatccaaggccgtttcagcactctggggttgtcctatcaggatatttttggaaagcttcgcctttggacattgatcatttccatattttccttctcgtcaacaccagattgatg

SEQ ID NO: 48096 - DNA, 268 bp, Glycine max
  Clone ID: 701037314H1
catcaccttccgaaataaggggttcattagtcagcacaaatgtcctcatgataaccggtggacagtttctttcctatcttgttaacctcgcttttactggtgttcctggtacttggcgatggatgcttggtgtttctggtgtgcctgctgttgttcagtctgttctcatgctcttcctccctgaatcgccaagatggctttttgtcaatcctaggataaatgaagccgttgatgtgctttctaagatctttgacgttgctcgcttaga

SEQ ID NO: 48097 - DNA, 270 bp, Glycine max
  Clone ID: 701037315H1
cggatgcgtccgggacgtttactacgacgaactcgaagatacaataagctatacaaacaagacgatcccagccccaaagcttcttcatagtcttcatcatcgcatgggtgaaagtgttatgagtcgatgattgttgggttattgtcgtcgtcaatacaccagatgactaggtgaattgctttaaggcaccatgtgctgaaggatgtcgggacacaacgctctgataggatgttacattggggtatagggtcttatagacggccttgttgg

SEQ ID NO: 48098 - DNA, 286 bp, Glycine max
  Clone ID: 701037318H1
gttcgtttcactctcacaatggactccctctctctcttctgcaccggagcccttctcgccggcggcctctactggttcgtctgtgctctgggccccgccgagcagaagggcaaacgcgccaccgatctatccggcggctccatctccgccgagaaagtccaagacaactacaagcagtactggtccttcttccgccgccccaaggagatcgagaccgccgacaaagttcccgacttcgtcgacaccttctacaatctagtcaccgacatctacgagtgggctgggg

SEQ ID NO: 48099 - DNA, 286 bp, Glycine max
  Clone ID: 701037319H1
caaggattctacccgccgctcgatgggaattgcgcttcaaggcgtctcgtagggctaatccgcctcacgagggtcaccaacggcacgtgcctttcgcgggccgaggccccctactgctggtcggcaaacggacggcgggcgcacgcgtcgcttctagcccggattctgacttagaggcgttcagtcataatccaacgcacggtagcttcgcgccactggcctttcaaccaagcgcgatgaccaattgtgcgaatcaacggttcctctcgtactagttgaattacta

SEQ ID NO: 48100 - DNA, 266 bp, Glycine max
  Clone ID: 701037290H1
ctttcctggggatgtgaccacagaaaggattgctgctcttcaggaagcatactggagtatggcgtcagactttctgaagcagatggaatcgattacactgatcctgaagagcttgagttgttggtcagaactcttatagatctggatgcaatggatggtaaacaaagtgtttctttattggcagagtgttctagttcccctgatgtcagcactagacgagctttagcaaatgcattggcagcagcaccatccatgtggactcttgg

SEQ ID NO: 48101 - DNA, 268 bp, Glycine max
  Clone ID: 701037266H1
gctttctgctagctacgagagatggatcttataccttcactggccagcataaacggtgataattggagactcaagtcaaggtgcttgctgccctccgttattgctcaatttacaacattgctttcaggaggaataaaaaaaatacaacaaaccaactgtacttcaataatgaatcaacagacaagatttgacccaaatccatcctatgaaaatatcttgtaactgaagaaccattatgcctaatcccgtatcttctggactccaaccc

SEQ ID NO: 48102 - DNA, 269 bp, Glycine max
  Clone ID: 701037267H1
aagaaattaacttgctttcatagttttcacatatttgaagtgacatcatgaatatggaggggcagaagaaaaacaagagggtggctgttttggtgggttgcaattaccccaacactagcaatgaattgcatggttgcaaaacgatgtgttggcaatgaaggacacgctggagaagcgctttgggtttgatccctctaacattgagcttctcactgatgcacctcactcttctaataaattgcccactggtgctaatattaaggaggcac

SEQ ID NO: 48103 - DNA, 271 bp, Glycine max
  Clone ID: 701037268H1
cgattttcgattctcttctctgcaactatgcctaaccctaaggtcttcttcgacatgaccatcggcggtcaacctgccggccgcatcgtgatggagctctatgccgacgtgactcccagcaccgccgagaacttccgcgcgctctgcaccggcgagaagggcgccgggcggagcggcaagcccctccactacaaaggctcgtccttccaccgcgtgatcccgaacttcatgtgccagggcggcgacttcaccgccggaaacggcaccggag

SEQ ID NO: 48104 - DNA, 273 bp, Glycine max
  Clone ID: 701037269H1
cggtgagaaaatttcaagcacaaaaaatggcggagaagaaagtggtcatcctaggaggtggtgttgccggagccaaccttgcaaaaactatacaacatcaagccaacgtcacccttattgatccgaaagaatattttgagttccatgggcaagtttgaggggattggttgagccaacttttgctgaaaggatagtgatcaaccatagagagtacttcaaaaagggtgaccttgttgtatccagtgctgtcaacataactgaaaccgcagtggt

SEQ ID NO: 48105 - DNA, 274 bp, Glycine max
  Clone ID: 701037270H1
ccattttccaaatcgccaaaataacgatttcccccaaaccctgagcttttgggactgtgtaaagattgcagcttgtttctgctattgattcaaattcgaaactttgatttggagcactcatccagcactacaaggatcttaaagtcactttgcagaacttcaaatatgattttagaatgtcatacaacgtgaaaacaaattcctctatatgttttactaaagtaggttctttgtgttgaatgtacaagtataaccatttctgggttttgtgtag

SEQ ID NO: 48106 - DNA, 268 bp, Glycine max
  Clone ID: 701037271H1
gctcgcagtatatcgtacataacggtcgtcgcagcttctctctctcagacgccatccaagcatcgccgtcgtcgatgtaagggacgatgagaggagctacgacggacacatatcggggtctcttcattacgcaagcgaaatttctccgataacatctcaaatctcattcaggcagttaaaggcaaagacactctcgtcttccactgcgctctaagtcaggttcgtggccacaattgtgctaggaggcttgtcaattatcttgaggaga

SEQ ID NO: 48107 - DNA, 268 bp, Glycine max
  Clone ID: 701037272H1
gctaggcacaatttttgttattcctatcttatcttaacattgtttcttggagttgattgaactggcagtgcaacctgaaattgagcatcccaggaaggcctatggatgggcagctagggatacatctggtgttctctccctttttggttctctagaaggaaaacaggggagaaagacgtgacatttaaagtgttgtattgtggagtatgccactcggaccttcacaagttgaaaaatgaatggagtgattccatctatccccttgtcc

SEQ ID NO: 48108 - DNA, 266 bp, Glycine max
  Clone ID: 701037273H1
ctgatcaaggaggaactaacaatggaggagggtatggtctgagggagaatccaaagaagacttggaggttcaatgattcgagtgaggacaacaacaacaacactactttgttggtgttggacaagttgtgcaaagagtgtggcaaagggtttcactcttggaaagctctgtttggtcacatgaagtgccactctgagaaattgtcccaaaacaacaacagcagcagcagcttattattggaggatcaagattcgtggaatgataat

SEQ ID NO: 48109 - DNA, 271 bp, Glycine max
  Clone ID: 701037274H1
caaacttcaaagttcacacacacaaaagaatcagcatggctttcaatcaagagttagaagctgtaacccaagctttctcagggcatggagtggatgagaaatcattggtaacattactgggaaaatgggatcctctggagagagaatctttcaggaagaagacaccacatttgttcagtgaagatcatgaacgccattttcagaggtgggatgatcaatatgtccgtcttctcaagcatgaattcgtgcgttttaagaatgctgtggtgct

SEQ ID NO: 48110 - DNA, 269 bp, Glycine max
  Clone ID: 701037275H1
gttggatggatgttcattttccaacttgataccgcgttcgctcactctcaactcaacttcaattaatcaaatcccacactttctctctctttccttcaaatctcaattctattttgcaaaatctgaatcaaacacagtaaagacgcacaagaaaacatctcgctcaacaccaccaacacttcggatctacgtttccactctccgaacatcaaaaaaggaaagaaaaaccgatttacagcgacaacaacgaacgaacgatttctcgaagc

SEQ ID NO: 48111 - DNA, 269 bp, Glycine max
  Clone ID: 701037276H1
gtcggatctctagctgacaaacaatgccggaagagggcttgtgtgacttactgcataacctacattttgagttgcatcaccaagcattctcctcaatacaaagtcctgatgttgggccgcattttgggaggtattgccattcacttctgttttcagcatttgaatcatggcttgttgccgagcacttcaagaggggctttgatcaacaatggctgtcattaacattctctaaggctatatttcttggaaatggtcttgttgctattttg

SEQ ID NO: 48112 - DNA, 269 bp, Glycine max
  Clone ID: 701037277H1
ctttctcctaaaacatctccagtgggttcttcttcttctattacaacaacgtcgtccaagaccatgaccatggccatggccacgatcctgctcctgttcacggtcttcgcggtttcatcggccctagacatgtcgataatctcgtacgacaacgcccacgccgccacgtcgcgcaggagagcgagctgatgtccatgtacgagcagtggctagtaaagcacggcaaggtgtacaacgcgctcggagagaaggagaagaggttccagatc

SEQ ID NO: 48113 - DNA, 272 bp, Glycine max
  Clone ID: 701037278H1
atcggcgccaagtacaagctaggtcgcaagatcggaagcggatccttcggcgaaatctacctcgccactcatattgataccttcgagatcgtcgccgtcaagattgaaaacggtaaaacgaagcatccgcaattgctttatgaggccaagctctacaatattcttcaaggaggaagtggaatcccgagcataaaatggtgtggtgtagacggggaggataatgtgcttgttatggacttgctgggacctagtcttgaggatctttttgtcta

SEQ ID NO: 48114 - DNA, 273 bp, Glycine max
  Clone ID: 701037279H1
ctcaaattagcatggctgtcatggttgcattcttgaatttgatcatcatcttttcagtagtctctacaacaggcaagtcactgagcttaaactactatgcaaaaacatgccctaatgtggagttcattgttgccaaggcagtaaaggatgccactgctagggacaaaactgttccagcagcaattctgcgaatgcacttccatgattgtttcgttcgggggtgtgatgcctctgtgctgctaaattcacaaggaaacaacaaagcagaaaaag

SEQ ID NO: 48115 - DNA, 275 bp, Glycine max
  Clone ID: 701037280H1
attaaaaaccacattcacattattcctccgaagatgacagtgacgagtggagaagaagaaggcgccgttggaggagttcagatccaacacaggagcagaatggtgctcccagattttctccagagcgtgaatctcaagtacgtgaattaggttacactacttgatctccaacctcgtaaccttattccttgtccctcttatcctcgtcacgctcattcaggtttttcagaccaccgacatcgaccacctccgccacctctggctccacctccagt

SEQ ID NO: 48116 - DNA, 270 bp, Glycine max
  Clone ID: 701037281H1
tgaaattgcctctttcaagaagcatctgagtgcttattatttgtaatatatatagtcactcaagcttctaggatttgtgccagctacatgaaaatgggaagcaacttcaggtttttgagtctttgcctcttggcattgattgcatcaacccatgctcaacttcagcttggttttcatgccaagagttgcccaaacgctgagcaaatcgttttgaaatttgtccatgaccatatccacaatgctccatcactagcagctgcattgataaga

SEQ ID NO: 48117 - DNA, 265 bp, Glycine max
  Clone ID: 701037282H1
caaagaagcaccgcgacgctgtctctcccactcttctccgccgccggtaaatgcaattctttctccactctttcatttccttacaaaaactaagatacgcaccttcgatttcgcatgctcttttttttgttctttcttcttttaattcaattggttgcacataaattccattttcattcttctccgattgcttttcattacattaccatattctctgtgttccgctccgcgtgcgtgtgcgtctagggtttccttaacaattaac

SEQ ID NO: 48118 - DNA, 266 bp, Glycine max
  Clone ID: 701037283H1
ctcgagccgcgcgtttgggagaagaagagcaaaatcgctgtgaaaatgagcggaacggtgaagaaagttagcgatgtagcattcaaggtgggaaggaacatcgattgggatggaatggcgaacttctggtctccgtgaggctcgcagggagttctccaatctccgtcgcgctttcgacgaggttaactcccaactccaaaccaagtttagccaggaacctgagcccattgattgggattactatagaaagggaattggcactcgtt

SEQ ID NO: 48119 - DNA, 260 bp, Glycine max
  Clone ID: 701037285H1
cttcttcactcttgattcttatctctcacactgaacactcttgtagctaatcgaatttctcattccgcagaaaccttcaacgatggccgctgaaacgattccctaccagaacggcgtcgttgccagctccaacgattcaccgccacgggcaagaaatcgcgggagaacgaccgccgccgccgccgccggaagcagaagaagaacaacaaggcatctgaggccccggttcctaactcttccgaagagagtgacgatgcgaa

SEQ ID NO: 48120 - DNA, 270 bp, Glycine max
  Clone ID: 701037286H1
gccctcagcaccagccgaaagccaagaaaaagctttcgatccctgtaactgcgttcgactatttagggttttctcggagacaatggcggatgaatcggagcacacggcggcgccggctgccggcgaatcgctgctcgacaagatcgccgagaagattcacggccacgacgactcttcctcttcctccgattccgattcggataaaaaggaatcttcgtcgattaaggagacggttttccgcctctttggaagggagaagccagttcactc

SEQ ID NO: 48121 - DNA, 265 bp, Glycine max
  Clone ID: 701037287H1
tcgaaaccctaagcactcgctcgggttcgtgtagtgccaaaccctagggctcattttccagatctattcagtttttctctcctctcttttccgatccaccgttggagatcgaagatggtgtccgacgccagcacgaagaaggccgcacagaagacggccgccgccgccgccaagagaggtggcaaagctgccgccgctgccgttatggccgccacctcttccaaagccgccgacaaggtcgccaacggaatcgccgatattcaga

SEQ ID NO: 48122 - DNA, 117 bp, Glycine max
  Clone ID: 701037288H1
ctggtggtccaacatacacattatatgccaaagagatggcgtggcaaagaaagtactgaaatggtccatgttgagtttgacacctgattccagtatactggaatgatgttacttgag

SEQ ID NO: 48123 - DNA, 267 bp, Glycine max
  Clone ID: 701037289H1
ggatgatggacaagggggtgttggatgatgtgataagaaggcttctggaagggaaaggagggaaacaggtgcaactctctgagtcggagatccgtcaactctgcgtcaacgccagacaaatcttcctctctcagccattcttctcgacctccgtgctcccatccgcatctgcggtgatatacatggtcagtaccaggacttgctgaggctttttgaatatggtggctaccctcctgcggcaaactacttgtttctgggggattatgt

SEQ ID NO: 48124 - DNA, 271 bp, Glycine max
  Clone ID: 701037265H1
cgtcggcgacgacctcaaccaccgcaacctcaccgatctcgccaaaaaattcggtgacatcttcctcctccgcatggggcagcgtaatctcgtcgtggtttcttccccggagctcgccaaggaggttctccacacgcagggcgtggagttcggctcccgcactcgcaacgtcgtcttcgacatcttcaccggcaagggccaggacatggtcttcaccgtctacggcgagcactggcgcaaaatgcgcgcatcatgaccgtcccttcttcac

SEQ ID NO: 48125 - DNA, 278 bp, Glycine max
  Clone ID: 701037239H1
tatttgcatctcataacagagagctgagaaaggaagaaaaaagcgtgtgtcagagatacttaacaatggttgtagaagatacccaaaagtcagtcatcacggaggaccaataccctagcagggtcgtcagcgacaacaacaacgacgacgacgacgatgatctcgaagacggtgagatccccgtcgacggcgaagatagcggcgccaccgccacaacgaagcctccggccgccctcgcccgaacaccccaccctctggagaattcctggaccttctgg

SEQ ID NO: 48126 - DNA, 275 bp, Glycine max
  Clone ID: 701037241H1
aaaccctaacactcctcttcctcttcgatcatcacctctccacaatgccgccgaagttcgacccctcccagatagtcgacgtcttcgtccgcgttaccggcggcgaagtcggcgcggcgagttccctggccccgaagatcggtccctcggtctctcccccaagaagatcggagaagacatcgccaaagaaaccgccaaggactggaagggcctccgcgtcaccgtcaagctcaccgttcagaatcgtcaggcgaaggtcacggtggtcccctccg

SEQ ID NO: 48127 - DNA, 277 bp, Glycine max
  Clone ID: 701037242H1
aaagatcttccttacaaaagtttgttttcaaagtgtgttttgtttcccaaatcctactcttgtgaccacaacccttcctcctctttcttttgaaacctctttttttctattccccaaccaaacaagcaaacgctactcactcatcatcactgagatcatggctcctaatatcaccactgtcaaaaccaccatcaccgacgctcaagccaaggtcgccaccgatcatggtcgtgcctacgtcaccttcctcgccggaaacggtgactatgtgaaaggt

SEQ ID NO: 48128 - DNA, 275 bp, Glycine max
  Clone ID: 701037244H1
gagacagggagacaagacagagtagtacagattactaccaatggctaccaaggtttacattgtttattattctacgtatggacatgttgagaagctagctagagagatagaaaaaggggctgcttctgtggagggagtagaagcaaactgtggcaggtacctgacacattgcctgaagaagtccttgctaagttgggagcacctccaaagagtgatgttccaattattactcccaatgagcttcctgaggctgatggctttttgtttggttttcc

SEQ ID NO: 48129 - DNA, 277 bp, Glycine max
  Clone ID: 701037245H1
attttggagaattggcaaaaacagggagagctcagctgacctgacaaaaataacagcagcatacatggctcctataatcattgtcaggtcagctgctgttatttttgttggaattaacaattgccaaactgttcaaccaattgtagccgttgaaagaacagtgttctatcgagaaagagctgccggaatgtatgctcctttgccttatgccttagcacaggtcttttgtgaagtaccatatgtgtttttccaaactgtttattactcactcatagtg

SEQ ID NO: 48130 - DNA, 277 bp, Glycine max
  Clone ID: 701037246H1
agcgttaccctcggaactgaactgaactgaactgaaccggatccagagagtgctcctaaacgacgccgtttcgcaagcatcagtagtgtagtcgcagagaatcaaatcaatggagaagggaaagggagtgatgggatcgcgaggacgagatggggcgttgacttctccgacaattgcacttctcgcgatattcccgatcctcccggtttctctcgcacttctctcgatcaggacgattcaacgctcagtcgccagaagaaggacgctgaatccaact

SEQ ID NO: 48131 - DNA, 279 bp, Glycine max
  Clone ID: 701037247H1
gtctttgcaccgtaccaaggcaacatttataggtctcttagagtatgggagggctaatgaatgggttgtgactgaaaaacttggtgactctgtcaacaataataataagaataaatcaggagatgctgccaagaagaataatgccatcaaggccacccccaaaaagactcgatccaaatttgttgaaagacttaatttactggagctgggatttgctgtcttcctcttcgtatgtggatgctatgattatgttcatgggaaacacaactacttcatcta

SEQ ID NO: 48132 - DNA, 286 bp, Glycine max
  Clone ID: 701037248H1
gcagttacatacatgaggcgtgtttacaccaggaagagtatggctgaatatgatccacgcttggtagctccaacatgcttgtacctggcatcaaaagcagaagaaagcacagtgcaggctcggcttcttgtattttacattaaaaaattatacagtgatgacaagtatagatatgaaatcaaggacatacttgaaatggaaatgaagattttagaagctcttaattattacctggttgtataccatccataccgttcactatctccgttgcttcaggatgcaggtc

SEQ ID NO: 48133 - DNA, 273 bp, Glycine max
  Clone ID: 701037249H1
cagaagtagtagcagtagcagtaggaagaggatgatcggcgtcggaaagatcaagcagtacagtaacgtcctcgacaagcccctcaccaagggcaagcaagaggttagtttgagcgcattcgcgttcttgttctcggagcttgttcagtacaaccaaacgcaggtcgacaatattggcgagcttgaacgaagactggaggatgctggatatgcggttggggctcgagttcttgagctgctttgccacagagataagggaaacagaagggagac

SEQ ID NO: 48134 - DNA, 274 bp, Glycine max
  Clone ID: 701037250H1
gagagagagagagagaaccgacaagcaaacgaaaagtaaatcaatcaatcgttggaatctctcaacttatcgcttcttcctgttttagatttgggggtttccgtttcaatggacgacggcgagctggatttctcgaaccatgaagtgttttcgagtccgaacatgggggagcttccgagcagcggttcaatggacagtttcttcgacgagcttctcaaggacacgcacgcgtgcacccacacccacacgtgcaaccctcccggccccgatttct

SEQ ID NO: 48135 - DNA, 275 bp, Glycine max
  Clone ID: 701037252H1
cgattggaagtttccttttgattaaacttaaagatcaagcgggccggcccagacatgccttaattgattatggtaaaaggaaagggaaagaggatgtgctttctctctctttgaattggcattggaattcaactcttctctttctctgtcgaagaacaagtagtttcagacagatgctagagaatcttcaggctcctccgtcaacaacggaatcggccccagtggtgaagcgctatgctccacccaaccagaggaaccgttctgctaacaggcgc

SEQ ID NO: 48136 - DNA, 276 bp, Glycine max
  Clone ID: 701037253H1
gtcgactcctgctaggaagaggctgatgagagacttcaagaggctgcaacaagacccgcctgcagggatcagtggtgccccccaggataacaacataatgctgtggaatgctgtcatatttggtcctgatgatactccatgggatggaggcacgttcaagttgacactccaatttactgaggactatccaaataaaccaccgactgtacgatttgtgtctcgcatgtttcatccaaatatttatgctgatggaagtatttgtttggatatattaca

SEQ ID NO: 48137 - DNA, 275 bp, Glycine max
  Clone ID: 701037254H1
cgaagggttacctcttccgtcttctccagtccgaagtctgcgcctttaccgagggtcgcattgaattggaagacatcacagaagaacgaatcaataacacgaatacctcaagtgagagggagaaatggaatcgcctccgcagtgggttcaagaggggcagaaacacttaaacatatagctcctggatcatcaatttctgttgcatatcacccatcttttggaccttatgatgacctcctctttctagagcttgatgagaaacttctcccagatgt

SEQ ID NO: 48138 - DNA, 274 bp, Glycine max
  Clone ID: 701037255H1
cagagaattagtccatagcaatggcagagcaagacaaggtgatcctacacgggatgtgggccagcccttatgccaagagggtggaattcgcccttaattttaagggcataccctatgagtatgttgaagaagacttgagaaataagagtgatttgcttctaaagtacaaccctgttcacaagaaggttcctgtacttgttcataatggaaaggccattgctgaatccatggtgatccttgagtatattgatgaaacatggaaagatggtcctaa

SEQ ID NO: 48139 - DNA, 262 bp, Glycine max
  Clone ID: 701037256H1
tgaagaagtagtggaagataacaagccaccacttccctcgtttcgaaggttgctcgcactgaacattcccgagtggaagcaagcatgtttagggtgtttgaatgcggtgttgtttggtgcaattcagcctgtgtatgcatttgcaatggggtcaatgatatctgtttacttcctcccagaccataatgcccccaagaggaaaactatgatctattcactttgtttcctagggttggctgcgttctccttagtggttatatcc

SEQ ID NO: 48140 - DNA, 272 bp, Glycine max
  Clone ID: 701037258H1
tcaacattttacactcttttcttcttctcgttgttgcttcgctgttgaatcatggatcagaaggtcgatttcagcgctccccattccatgggaaccactatcatcggcgttacttacaacggcggtgtcgttctcggagccgactctcgaaccagcaccggagtgtatgttgccaaccgagcatcggacaaaatcactcagctcactgataatgtatacgtgtgtcgctctggatcggctgctgattctcagattgtctctgattatgtgcg

SEQ ID NO: 48141 - DNA, 269 bp, Glycine max
  Clone ID: 701037259H1
caaaacacaacacaaattcagattgtttcctacgcgtcttaaattttatcttcgaggttgcatttgaactttgcgcaacctcattattattaaattaaattcattgatccctcgcctagagaggggaaatccagaaatactctgattgacttatatacggatcttattattattttctccatttaatttaaacgcaatttagttgtctgtagcgccgatgagttgcttttcgtgctttgtttctcgccggaaagatgtgagaagggttg

SEQ ID NO: 48142 - DNA, 289 bp, Glycine max
  Clone ID: 701037260H1
agcattacacctcgcgctcgagccgctcgagccgtgcgtttgtcgttcatatgactcctgccctgtaagtatcatatcatggcaaacttaacttgacaacatattcctacgatcagtttccaaatggaagcgttttacacaactctctgctcccctggtccacgtctgttctcaattttcagggctctgaattgcctagaagaaatctttgtaagaactcttcacacactatttttgcatcacctacgctgcctaaaccgtttcttcagatttgtggtagacctcagac

SEQ ID NO: 48143 - DNA, 276 bp, Glycine max
  Clone ID: 701037261H1
agaaaaagaagaaaaaaacacagcgtcctagatttcctcttctctgcttcggaagaaagagaaaacaaacaaaacaatggcgttcgcttctttcctcggcagagtcctcttcgcttctgtcttcatactctctgcttaccaacaatttaatgaatatggagttgatgggggacctgctacaaaagcactcagacctaagtttgatgcctttacacatcgggtgcattctcaagtgggctttcaaattccagagattaatctgaaatttttaattgc

SEQ ID NO: 48144 - DNA, 276 bp, Glycine max
  Clone ID: 701037262H1
aagataccttctttcagcctcccttcaacacccttttgcccccttattcttcaaagtctcaaagcaaagctcgaagacctgagaagaacaaagggttgattaaattctgtgtggttgttgttggaggttgaaacacaagttgccaccccaagtgtgtgttaatcttaaatttcacaagcaagttgcttttttggagtatcatattgtatcaccaaatatttttgtgttttaggactagatattttgcttctggtggcaatttttctcttctccttc

SEQ ID NO: 48145 - DNA, 279 bp, Glycine max
  Clone ID: 701037263H1
ggaaaaggttcacatcagtattgtggtcattggccatgtcgactctgggaaatccactaccactggtcacctgatttacaagcttggaggcattgacaagcgtgttattgagaggtttgagaaggaagctgctgagatgaacaagagtctttcaagtatgcctgggtgctggacaaacttaaggctgagcgtgaaagaggaatcaccattgatattgctttgtggaagtttgaaacaacaaagtattattgcacagttattgatgcgcctggacatagg

SEQ ID NO: 48146 - DNA, 284 bp, Glycine max
  Clone ID: 701037264H1
ctcatcttgttttcaacgatgatattcaggggactgcatctgttgttcttgctggggttgtggcagccttgaagctcattggaggtactctggctgaccacacattcttgtttcttggtgctggagaggcaggaactggaatagcagactaatagctcttgagatgtcaaagcagacaaagacacctatagaggagactcgcaagaagatatggcttgtagactcaaagggtttgattgttggttcaagaaaggcttcacttcaacacttcaagcagccttggg

SEQ ID NO: 48147 - DNA, 278 bp, Glycine max
  Clone ID: 701037238H1
gcctcccctcagaaaccaatgtccataatcaccccacgccgtcatcctcaaacgacacccttccgctagcaaaacgactgcggtttggtcgtcgtcttccccgaggcatgctcttgggatattattattcatcatcgtaatcacacctacagagacgttgactttgtgctttttctgggaggggaacaaatggaccaagctcttctggacgacataatcaatcgccttctcgaagttcgcagccggccggggaagcaggtgcagctgtcggagtcgga

SEQ ID NO: 48148 - DNA, 282 bp, Glycine max
  Clone ID: 701037213H1
cacgagaggagcgatgtgattctgctaaagtttctccgggccagggatttcaaggtgaaggatgccttgagcatgctgagaaacacggtgcgttggagaaaggaattcggaatcgagggtcttgtcgaggaagatcttggaagtgattgggacaaggtggtgttcagtcatggacacgacaaagaagggcacccggtgtactacaacgtgttcggtgagtttgaggacaaggagttgtacaacaagacattttgggacgaggagaagaggaacaagttgata

SEQ ID NO: 48149 - DNA, 286 bp, Glycine max
  Clone ID: 701037215H1
tccagaacagcaagggagaatcaattcctcatcgctgcaattcttctttcactctctagtttctcttctttctttcttccaacctcttctcttctatacccttcagaaaagaaattaaaaaacgtagcttcagattattctagctcttcattttccatgttcaatattatgctgtaaatttcctcaaactcactgtttcagccacattttggtctaaagatccgtgctttgacccttggcaggttcagcttttgaaggggttggagtttttcttcctcataagcca

SEQ ID NO: 48150 - DNA, 290 bp, Glycine max
  Clone ID: 701037216H1
caagaacaagaagcaaaagcaccaacaccccaatgaccaaagcacaaagcagaactctgatttctccttcaagccaagctcagaggtaaagggtatcaaatttggaggccagttcatagtgaagtccttcacaatcagaagagcaagacccttggagcttctcaaggttctttctttcccaccaaccaccaacaccaacaaaccaaaggacaagctccctttcccttccaccacagcattcttgcccacaaacttcaccatcttggcacaccatgcttggcacaccctca

SEQ ID NO: 48151 - DNA, 270 bp, Glycine max
  Clone ID: 701037217H1
atggcttctctggcgttgctacgtcgaaccacgctctcccactcgtccgtgcgtaacagaggcttctctgaggggcagagcagcaacagacaccgtctcgaccagattctagtagccaaccgcggtgaaatcgcttgcaggatcatgcagaccgcgcggaggctcggcattcaaaccgtcgccgtttacagcgacgccgacaaggactcgctccacgttgcgtccgccgacaaggccatccgaatcggaccgccaccgggccggctcagt

SEQ ID NO: 48152 - DNA, 278 bp, Glycine max
  Clone ID: 701037218H1
taatcaaacatggctagggttagtgctttgtttcactctttgctcttgatttcttcccttgtattggcttctcaaatccatgtttcctctgggaaactagtccctggactatcatggaattactatttgttgacatgtcccaagcttgagaggattataaggaagcatcttgaggatgtcttcgagaaggacagtggagtagctcctggcatacttcgactcttcttccatgactgctttcctaatggatgcgatgcgtctatattgttgaatggaga

SEQ ID NO: 48153 - DNA, 280 bp, Glycine max
  Clone ID: 701037220H1
aacctctcaagtccaacctacccctttttcttctcccaccaacttcaccgtcttcttcctcgatcatgtctcacttcaagggcaagtaccatgatgagcttattgtcaatgctgcttacattggcactcctggaaagggtattcttgctgctgatgagtcaacagggacaattggcaagcgtttggccagcatcagtgtagagaatgttgaatccaacaggcgtgctcttagggagctgcttttcaccgctcccggtgctcttaaatatctcagtggtgt

SEQ ID NO: 48154 - DNA, 279 bp, Glycine max
  Clone ID: 701037221H1
ctcgagccgctgcaaggaatgccatcgaagctggttttgatggggttgagatccatggggctcatggctacctgcttgagcaatttatgaaagataaagtgaatgaccgaacagacgaatatggtggatccttgagaaccgctgccgtttgctttggaagttgttgaagctgttgttaatgagataggggcggacagagttggaattaggctatcgccattcgcagaatattcagagtctggagactctaatccaaaagaattggggctttacatgatg

SEQ ID NO: 48155 - DNA, 282 bp, Glycine max
  Clone ID: 701037222H1
attcaattcttgctgccaaagccaaaacaaaactgagtcatttctttgtttaggagtttggttctgcaaaaagccaaaaagaagaagaagaatacatggaagcagagacctcaaacggtggtggtattggaggcctttacgtcaaagtatgaccgacgaccaaatggaactgctcaggcaacagatttctgtctacgccaccatctgtgaacagctcgttgagatgcacaaggccgtaactacccaacaggacctcgcagggctgaggctgggtaatttgta

SEQ ID NO: 48156 - DNA, 280 bp, Glycine max
  Clone ID: 701037223H1
cttttcacaacctcactacccaactaacactctttggcaatgttgcgacttgatgcaaatgaccttgtcttgcttgttggtgctcacacaattggtattgcccattgttcatcaatttcaacccgtctatacaatttcacaggcaaggtgacacagacccaacaatagacaatggatatgcaaaaaatctcaagaccttcaagtgtaagaacattaatgataactcacttattgagatggaccctggaagtcgtgatacatttgatcttggatattacaa

SEQ ID NO: 48157 - DNA, 276 bp, Glycine max
  Clone ID: 701037225H1
tgattgatcgatgattgatgatggttcgcgcgtcggtgaaggtgggttccgccaagttcgtagtgatctgcgtggggcttttgggcttcgctctcgtcgccgactttctatgggcctctacctcttccactcttcccacctccaccaaccctccgcatttgtggttccctccaaccacaataagaagaaatatgagaatgccactgcttctggaagattccttgccgcggcttacgccgatttggctgcgccgcagctcaagtggcaaaagatggc

SEQ ID NO: 48158 - DNA, 279 bp, Glycine max
  Clone ID: 701037226H1
aagagactcaggcgctgctgcccttcagtccttcagcaatggtttacgtgaagtcacagaaatcaaaagcctacttcaagaggtatcaagtcaagttcaagagaagaagagagggaaaaaccgattaccgtgccaggattcggttgataatcaggacaagaacaaatataacaccccgaaatatcgctttgttgttcgtttcagcaacaaagacattgttgcacaaataatatctgctagcattgctggcgatattgttcttgctgcagcatatgcaca

SEQ ID NO: 48159 - DNA, 278 bp, Glycine max
  Clone ID: 701037227H1
gctcgactatggcaagggtcagatgatggtaactacaactgcaggcacatcttaaaggatcatacagctgaggtgcaagctgtcactgtccatgcaaccaataattactttgtgactgcttcacttgacggctcttggtgcttttatgaactttcttcagggacatgtctgactcaggtttatgacacttcaggttcttctgaagggtacacttctgcagcttttcatcctgatggtcttattcttggaaccggcaccacagaatctcttgtcaagat

SEQ ID NO: 48160 - DNA, 281 bp, Glycine max
  Clone ID: 701037228H1
cgcaagaggccagagtcgttttaaatccaatttttccatgtcgttcgcatcatcattctcgatgctccgccaccgcgcggtcgggcatacgcgcccactctcctcctccgccgcttccgctgtctcccaacgatcgccgccagacaccaacaacaacaacaaaaccctaacaaacaagctgctgccccgagccgcaacctcctgaaggcgaaacaaacactgaaagagtattcctgtcttgcccctgtcctctccctcgaagacagccctcctctgacgga

SEQ ID NO: 48161 - DNA, 279 bp, Glycine max
  Clone ID: 701037229H1
gctgaccacaaatatgagctgctgtgggtaatacttattggactggtgtttgcgcttataattcaatcattggctgcgaatctcggcgtaaccactggcaaacacctttcagaattatgtaaagctgaatacccattattggtcaagtactgcttatggttattagctgagctggctgtcatagctgcagacatacctgaagtgattggcacggcatttgctttgaacatactcttccacatccctgtatgggcaggagttctaataactggctgcagc

SEQ ID NO: 48162 - DNA, 280 bp, Glycine max
  Clone ID: 701037230H1
gttgcatagcattggttggtagttgtctcaaaaatctcttcttgccctttggccataatcaaaagccaagacactgttcatacagctgctcaattatcaagccaaccttgctcggttccactgcagaatttcagtttattcttatctagtagattggattgaagtagactccttataagtgcgcagaagttcaagtgtagagaatgagtcagcctaagattaaacgccgagttggtaaatacgaggtggggaggaccattggtgaaggtacatttgcaaa

SEQ ID NO: 48163 - DNA, 284 bp, Glycine max
  Clone ID: 701037231H1
gcagtgtatactaaagattaaagaatagtataatatagaagattggggttagggtttgatcgcaacgcaatggctggcaccggcatccatccataccaccagcaatgggctccggcggcagcgctcctcctcctcctcctccggcagccggggcggtcctcctcctcacccaggggaggaggttcgacctatattcataactggtcttccggaagacgtgaaagagagagagctgcagaatcctgctgagatggttgcccggtttcgaagcatctcaattgaat

SEQ ID NO: 48164 - DNA, 276 bp, Glycine max
  Clone ID: 701037232H1
gtccattgtagattgtcacatatagagaaacagaattagaagaagggtaactgggaaactttggcaattgaaacctttttttccattgagtgatagagagcatcgagaacatgcagatgaacaacgatgacaggtttgcacaaagggtgtccagttctagccaggtttgaagtccagcagagtcagagaaaattttgattggtccctggcaagccaagataagatctgtttcgcgaaatagccggcaatttcccgatcccgttggggatctcggcc

SEQ ID NO: 48165 - DNA, 272 bp, Glycine max
  Clone ID: 701037233H1
cacctttgttcactcttcttctcttgcggctagggttttagcgcagttcttctagatttaaggaagatgggtaaggaaaaggttcacatcagtattgtggtcattggccatgtcgactctgggaaatccactaccactggtcactgatttacaagcttggaggcattgacaagcgtgttattgagaggtttgagaaggaagctgctgagatgaacaagaggtctttcaagtatgcctgggtgctggacaaacttaaggctgagcgtgaaaga

SEQ ID NO: 48166 - DNA, 277 bp, Glycine max
  Clone ID: 701037234H1
gaggcttctgaacagtttctgacaccgaaattcagccacaaagttgaccatcttgggatggatgagaatatcatcatgttccaccatttccccacattgatacaacaaggagattccaacaattgaaaactccttatcatctttctcttgcaacatcgtttcgcggttcctttgccgtgatttcaattgttgcataagaaaacatcactcactacttctttcctctcctttttcattcaatttctctgattgacacaattgctcgccagatcagtga

SEQ ID NO: 48167 - DNA, 276 bp, Glycine max
  Clone ID: 701037235H1
caaaatccttgggaacagtaattggttttgccatttcaaagctgggaaagaacattcaagtactttcaagttcctttgtcaataagcaagagcaatacactgtggaaggagtgcagaatcttggagacaaagcagtgatgtgtctgggctaaatttcagaactgcagtattttactgccataaagtccgtgaaacaacagctttcatggttccattggtggctggtgatggaaccaaaactcaggcacttgctgtttgccactcagatacttctgg

SEQ ID NO: 48168 - DNA, 275 bp, Glycine max
  Clone ID: 701037236H1
cttgaaaacaacgttggatctgtggctgtgaaacttacaaatgcagagttgagtgaaatttctgatgcagttcctgtttatgaagttgctggggaagcaccaggccttggttctttatcgcaatatacttggaagtttgctacaccccatcaaagtaattgtgttagagaagataaacacgactttttcttccctcacaatccattcacgaaaatgagtgagtagatttttcagtgtattgttgataattggtgaaaggactcgtgctactctgt

SEQ ID NO: 48169 - DNA, 277 bp, Glycine max
  Clone ID: 701037237H1
atctcaaatgctaagagtgagggtgcaaccattttgactggtgggtctcgcccagagcatctaaagaagggattctttgttgaaccaactgtcataactgatgtaactacctccatgcaaatttggagagaagaagtatttggacagttctctgtgtaaaaacatttagcactgaggaagaagctattgatctagcaaatgacactgtatatggcttgggttctgctgtaatatcaaatgatctagaaagatgtgagcgcattactaaggcttttaa

SEQ ID NO: 48170 - DNA, 278 bp, Glycine max
  Clone ID: 701037211H1
gttggaaagaaaccctagcaagcggaacaatggcagacgttgaggtcgatgtggcggctgcagcagcagcagggcagccgaagaagagaacgttcaagaagttcagtttcaggggcgtggatctcgatgcgcttctggacatgtccacgatgaactcgtgaagatgttcagtgctcgcgcacgtagaaggttccagagaggcctcaccagaaagcccatggcctcgatcaagaagcttcgcaaagcgaaaagagaagctccaccaggtgagaagccag

SEQ ID NO: 48171 - DNA, 271 bp, Glycine max
  Clone ID: 701037180H1
tcaatttctaattagggtttcgcttagagtaaccaataaccatgggagtcttcacctttgtcgtccgcaaatccggcagcgaatggagcgccaagcaacattccggcgacatcgaggcctccgccgattccaccttcgatctccaacggaagctcgtgcaagccgctctcgccgttgattcctccggtggagttcagtcctctttctctcccgtgtctcctacctccgctgtgttccaggcgatagtgggtggtgcagtattcgttggagg

SEQ ID NO: 48172 - DNA, 271 bp, Glycine max
  Clone ID: 701037181H1
gggagaaggaccccattgacaatgagggctactggggaagtggctcagatttgcccacaatgagcactgtggagaagatcctaagcaatttgagctcaaaagtttctgtcatcaacattactcaactatcagagtatagaaaggatggtcatccttccatttttcgcaaattttgggagccccttcgcccggaacaattgtcaaatcctccatcttactctgattgcatacattggtgcttgcctggggtacctgatgtgtggaatgagtt

SEQ ID NO: 48173 - DNA, 271 bp, Glycine max
  Clone ID: 701037182H1
ggttctactgtttgagcttgatgctattcgaaaggcatgtgcatccctggaacccaattatcagcctcctgtgacttttgtggtggttcaaaagcgtcaccacacaaggctctttgctagcaaccatcatgataagagttctgttgacaagagtggcaacatattgcctggcactgttgttgactccaaaatctgccatcccaccgaatttgacttttatctctgcagccatgctggaatacagggtacaagccgtcctgctcactaccat

SEQ ID NO: 48174 - DNA, 265 bp, Glycine max
  unsure (1)..(265): unsure at all n locations
  Clone ID: 701037183H1
gtggtttcagtgagtgatcggtgttcacttgatccttcataagtcgtcatcatcatcatcatcatcaccgttgattgaagaagatgccgatcagaaacatcgccatcggaaggcctgaagaggctactcaccccgacacgttgaaggcggggttggctgagttcatctccaccttgatcttcgtgttcgccggttcaggttccggcatcgcctacaacaagctcaccgacaacggcgccgccactcncgccggcctcatctccgc

SEQ ID NO: 48175 - DNA, 263 bp, Glycine max
  Clone ID: 701037184H1
cacgatctcaacggagcacctctcttcaggtcgccatctagactgcaatcatggctgatggaccacagcatccatcagttgttcagaagctagctggacagtcttacctggtgtccaggctaagccccaactttaactctgggaattattcctcgactggttcttacttcaatggaggactgcactcttctgggttggctgttgtgtcgcctggatctccagttactgtgcatgctccagcagagaaaggagtgagtggattt

SEQ ID NO: 48176 - DNA, 269 bp, Glycine max
  Clone ID: 701037185H1
actcgagccgaatcggctcgagaatgaacccaacaacaagtacgatacttttctgtgtttagtacggcccagatacccgctacaccttcgctggtaatctctataatgctttgcgccgcaacagaatcaatacctttttcacagaagataatcatcatgatgagctactactcatgaatggcgaccaaatttcaccctttgctctaagagcaattaaagaatcaaacttgttaattgttgttctctctccaaactacgcatcatcccca

SEQ ID NO: 48177 - DNA, 266 bp, Glycine max
  Clone ID: 701037186H1
atctccacatattctgatccaacagtctttaacactcgaagattctctccttttcaaatttcaaaccttttcccccaaaactaacagacccctcttcttcttctctctctgtaatctcaatcgtgcatgggtcgtcttcactgattcgataataaaaatctcagattcattcttcgttttctgttacgatggagttgatttcaggtctaccagaggacgtagcccgagactgcttaattaggattccctacgagcaattcccggcg

SEQ ID NO: 48178 - DNA, 264 bp, Glycine max
  Clone ID: 701037187H1
cttgcggctagggttttagcgcacttcttctagatttaaggaagacgggtaaggaaaaggttcacatcagtattgtggtcattggccatgtcgactctgggaaatccactaccactggtcacctgatttacaagcttggaggcattgacaagcgtgttattgagaggtttgagaaggaagctgctgagatgaacaagaggtctttcaagtatgcctgggtgctggacaaacttaaggctgagcgtgaaagaggaatcaccattg

SEQ ID NO: 48179 - DNA, 263 bp, Glycine max
  Clone ID: 701037188H1
agcggcacattaaggagattctcgggacgtgcgtctccgtcggatgcaccgttgatggaaaggatcccaaggacttgcagcaggagattaccgatggtgatgttgaggtccctctcgattaaggaggaaggctttgttactctctttctctctttttcttttgtctttcttcagatcgtttcgtgttctttttaatataaatttgggggaactatcgaacgttttgtttaaggttattttaccgctttggataatttagatga

SEQ ID NO: 48180 - DNA, 266 bp, Glycine max
  Clone ID: 701037189H1
ctttctttcgccaaatgggtcatcatctccttctcccataacacaatcttcttcaccttttctttcttcttcgcttcccttcggtggggtttcaagtttcaccataggaataggatgttttctaggttgattcatccccatgaaggccaggaagacatgcagggtggttccaaccacgctcacctcggagacccttgtcttgttctcacctctgatcccaaacctcgtcttcgttggaccgctgaccttcacgaacgctttgttga

SEQ ID NO: 48181 - DNA, 263 bp, Glycine max
  Clone ID: 701037191H1
gtacagatacacacttggctgaggaaggtcggaaaagaaaatggagttgttcttctacacggtgttcggtctccttggccgcggttgtggcagttatggagctgagcaagaacaacatcgatcgaatcaacacctcttccgcattcaattccttccagaacaactacctcctcgtctattccctcatgatggctggggattggctacaaggtccatatgtctactacctttacagtacatatggatacgggaaaggggacata

SEQ ID NO: 48182 - DNA, 261 bp, Glycine max
  Clone ID: 701037192H1
catgcttcagagttgcagaagtgtgtgtgagtttgagatgattaagaaaataaacgaaggaacttatggtgttgtctacaaggctagggataagaagactggagaactagtagcattgaagaaggtgaagatgaacatagagagggatggatttccaatgtcatccttgagagaaataaacattctcttgtcttttaatcatccctccattgtgaatgttaaagaagtagttgttgatgattttgatggtacttttatggt

SEQ ID NO: 48183 - DNA, 262 bp, Glycine max
  Clone ID: 701037193H1
cttagcagcaggcccattcagcggcggttcaatgaacccagctcgctcattcggcccagctgtggtcagtggagacttggctgctaactggatctactgggttggcccattgattggaggaggtttggctggcttgatttatggagacgtcttcattggttcctatgcccctgtcccagcctctgaaacctacccttgagcttcaacttcacttgtgtgttccttcaagtttcatctctgttcaccgtttcatgtcatgagc

SEQ ID NO: 48184 - DNA, 263 bp, Glycine max
  Clone ID: 701037194H1
gggaaccaaaccgaaaccctaaccctaacggagagatggcggacacttggcatcgatattcgggacggagaaggacagggtgaactgtccgttctacttcaagatcggcgcgtgcaggcacggcgaccggtgctcccggcttcacaccaagccgacaattagcccaacattggttctgtcgaacatgtaccagaggcccgacatgaacatgaacattatcaccaaccccgatcagccacaaccccaatcccttgaccccgaca

SEQ ID NO: 48185 - DNA, 267 bp, Glycine max
  Clone ID: 701037196H1
agagaatcgaaggcgacacacagcttgcatccgattccgagaagaagacgaggcttctctttcgaatacaatctttctgctacatgatgttgaacaaatgatacagaatttattctgtgcacagaaattctggtacatatgacaggacttatgcctggcgacttgccacatcatggaacacctgatggcaactctggtaaaagttctcaagacaagcaagaggaatcattaggtcgctggtatatgtctagacaagaaatagaggaa

SEQ ID NO: 48186 - DNA, 283 bp, Glycine max
  Clone ID: 701037201H1
ttctaatgacctcaatgtgacctcttctgcttcggttaaaacactaagcatggacaaagtgtaaaactcactttttatggctttcattgtcttcttcaacttgttcctggaagccaagtattttccacccacttttgtgaaaacagtttcatcactttccttctttggatgacagagtgaagttcctgcatgctttcctttgatatcaattggcactccttagctgtactgcagatatccaagagcctcagagacacttctagaatgtcatcaacgcacttgt

SEQ ID NO: 48187 - DNA, 282 bp, Glycine max
  Clone ID: 701037203H1
cgtttgtaagagaaagaaaaaagaggcgcaagatgagtggtagggtttctgggaaggtgaagtggttcaacgatcagaaggggtttggattcataacccctgacgatggcagcgaggacatcttcgttcaccaatctcagatcaaatctgacggtttccgaagcctagctgaaggagagtccgttgagttcgctattgaatctgaatctgacggacgcgccaaggctgttgatgtcactggccccgacggcgccaggctccagggaaccagacgcggcggtg

SEQ ID NO: 48188 - DNA, 280 bp, Glycine max
  Clone ID: 701037204H1
gattatcctaagtctttgggaatagtgctgcaatggcttcaagtcaggaggaggtgacccttttgggagctactggaagcccatttgtgtgcagggttcatattgccctcaagttgaagggagttgaatacaaatatgtcgaagaaaatttgaggaacaagagtgaactgcttctcaaatccaacccagttcacaagaaggttccagtgtttattcacaatgagaagcccatagcagagtctcttgtgattgttgaatacattgatgagacatggaagaa

SEQ ID NO: 48189 - DNA, 284 bp, Glycine max
  Clone ID: 701037205H1
cggatccagagagtgctcctaaacgacgccgtttcgcaagcatcagtagtgtagtcgcagagaatcaaatcaatggagaagggaaagggagtgatgggatcgggaggacgaagatggggcgttgacttctccgacaattgcacttctcgcgatattcccgatcctcccggtttctctcgcacttctctcgatcaggacgattcaacgctcagtcgccagaagaaggacgctgaatccaactggaaagcccagaaagcttgggaggtagcacaagcccctatgaa

SEQ ID NO: 48190 - DNA, 285 bp, Glycine max
  Clone ID: 701037206H1
gaatttcccaaatttctccactaccctatctcctttgctcctgaaactcgcacattcttcatcagcaatgcacgatcttcaatacgaatgcaatttcgatatttgacatcggagtatcagtgtttgagcgggtgaattggaaaatgctagaggcaatggaaagttcggtcaatggtggcttctcccatttgcagagctgtggagatagcagcgaagaagagttatcggtgcttcctcgtcacaccaaagttgtcgtaaccggaaataaccgcaccaaatcggtgc

SEQ ID NO: 48191 - DNA, 273 bp, Glycine max
  Clone ID: 701037208H1
ctcgagccgtggtaatattgcaagcttgtggcaacaagctggtagaggtgggaggagagatagaccatctcttgctgtctatgttgcatttggtgggcctcttgatcaatacttcatgacaaatcccaagaaactctttgaaagaccattgaatgttgccatgttgattcccaaaacaagcaggttcttgaacaacatttggtctgcgcagtcatgaacacctttgagtgtgaactatgatgagcatattttggtcttgcttgagagtgtcat

SEQ ID NO: 48192 - DNA, 279 bp, Glycine max
  Clone ID: 701037209H1
ctcgagccgttttctctgcatctgtagtatctatcaccaatcaattccactcttcttcccatccaacaacaaaaaatcaatctgggaaacaaaaacaaaatgccgtcattagaggaggaactcttcccatcaaccccaggaaagttcaagatcgagcggtcccaccacatgaaccgccaactctatcgctgtttcgcctccaccagcaccatgttcctgtgggccctcttcttaatcgccctcaccgcttcctatctcagcttccaaggcttcgtcgat

SEQ ID NO: 48193 - DNA, 281 bp, Glycine max
  Clone ID: 701037210H1
gacgaatcacaaccagaaaacaaggcaacagaggcagagatatatgattatgaatttctcaacagaaccctctgcctcacgcttaccattctgatctccacttcttcgctgtgcgacgaagtgaaatttcgttgctgcaaatagtgagatttgctgtctttggtcagagttgctccgagtgatcgcttcccctggtgcgacgaagtgaaatttcgttgctgcaaatagtgagaatttgctgtctttggtcagagtggctccgagtgatcgcttcccctggt

SEQ ID NO: 48194 - DNA, 266 bp, Glycine max
  Clone ID: 701037179H1
gaagaaagagacctgaaagtgtcgttgagtcagtgtgtgtgtgcatcagaccaaaagcaacaatgggaggcacttgtgcagatcttcaccaccatgaatcagatatagaactcactgatgctgaaaggattggcactgatgttggacctgacagtggcaccaaatcccagggtgaagaagctgaaggacaacactacgttgaggtgaccatggacattcatcgtgactctgtggccttacacagtgttaaaactgttgcagctgat

SEQ ID NO: 48195 - DNA, 274 bp, Glycine max
  Clone ID: 701037151H1
ctaccttaaacttccacaatacaactctctcttcctataaacgctgttgtttaacgtgagaacttgggtgatctttttggagttgtaggagcccttacaccttgcagaatcatctctacattcccaagggctcctactacgcaataactccaagcccgatctcaaattaatatttcatttactcatcttaatcaatattaaataagacaagatgggagagatgtcaaacttccaattgggtgtgattggtgcactatttctctctgtggcttct

SEQ ID NO: 48196 - DNA, 269 bp, Glycine max
  Clone ID: 701037152H1
cttctccctcttatccacctcagcagtggtctacaccgtggcctcaatctacacttcacgagaagtcactttctccaaagtcatgaacgttgttcccaaagtatggaaaagactcatggtaacttttttatgcacctttgtggcgtttttcgcgtacaacgttatgacactcgttgttttcgttatatgggcacttgcaataggactaaggaatggtggggttgtggttttggttgtgttggggatgttgtatttcgcggggtttgtgt

SEQ ID NO: 48197 - DNA, 269 bp, Glycine max
  Clone ID: 701037155H1
cttgatgtcattcagacctatgtgttttggaatggccatgaaccttctcctggacaatactatttcgaagataggttcgacttggttaaattcgtgaagctcgcgcagaagcaggcctctatgttcatctccgtattggtccctacatatgtgctgaatggaacttggggggatttcctgtctggctcaagtatgttccaggcattgctttcagaaccgacaatgagccgttcaaggctgcaatgcaaaaattcactgcaaagattgtc

SEQ ID NO: 48198 - DNA, 270 bp, Glycine max
  Clone ID: 701037158H1
attatcttgggcgatggaaatcctaaagcaattttcaacaaggaagaggacattggaacctacaccatcagggctgtggatgaccctaggacattgaacaagattctctacctcaggccccctaagaacatttactcgttcaacgagcttgtggccttgtgggagaacaagattggcaagaccctcgaaaaaatttatgtaccagaggagaaggttctcaaggacatcgaagaggcacctcttccaatcaatgtggtattagcaatcaac

SEQ ID NO: 48199 - DNA, 266 bp, Glycine max
  Clone ID: 701037160H1
tgccgctgttgttgttgctgcaccaccgaacaacttcccctgtaaatcgcgtttcgtttgtgcaaggttttaaaagatggctgatgctgaggacattcaacctcttgttgttgataatggaactggaatggtcaaggctggttttgcaggtgatgatgctcctagggccgtgttccccagcattattgggagaccacgccatactggtgtaatggttgggatgggtcagaaggatgcttacgtgggtgatgaagcccaatcaaaaa

SEQ ID NO: 48200 - DNA, 266 bp, Glycine max
  unsure (1)..(266): unsure at all n locations
  Clone ID: 701037161H1
ctccgaacgagttgacaccgattccactcactcaaccatgagccgattcaggcgttttgagctcatagaacaaccacctttcttccactcctgctactctttcccttccttcgtcctccaagactcactctctctcgacctcgacctcttgccacttcccagccacttcgacgctttcgcagatctggtgcacgcgncgtcgttcgcttaccggcgcgtggagaggcatctcgagaatgagttgcgtttgcagagcctctctgacc

SEQ ID NO: 48201 - DNA, 267 bp, Glycine max
  Clone ID: 701037162H1
gctgagctgaccaagcatgattcaaaatggttgcattgtatcccaagggtgtgcccctctgaattctaggtcacgcaaccatggcatacctagtacctctgcctttcgttgcgcttctctaatgcctcccaaggttgccgtctctaacatccggagcttttggggacataatctggaatgtaaacccttgttgccaagaggaatgacattgacaaacacgtttgctgtatcaagcctgcgtgtaagggagggtcaaaatcatctctt

SEQ ID NO: 48202 - DNA, 271 bp, Glycine max
  Clone ID: 701037163H1
atccgattgaaagaataagtagcaactctgtagcctcttttcccatcatctccttacctcctcttttttcaaattagtcctgcagaagaagatcatcatgaggcgcttaaagtcaagaacaacaccacttttgtccaagtttgcgccgttgttggagccatggccaaatgatgctataagaaaggaactataaacctgatcaggacatttgacctgaggaaacatgccctctaggcaagtctgatgcttggcttttcatctctgctgttga

SEQ ID NO: 48203 - DNA, 270 bp, Glycine max
  Clone ID: 701037164H1
agcagcagcaacaacaaacaaactctttctggattcagtttttgatgtgaaaatggcagtgactcttacatcaacactctttctggctttgctatttgctgcttcagcttttgctgctcttcagcctagagtacctgaagcttacctccaaaatgggaactttgaggagcagccaaaccctaaatacctgaagaaaacaaagctctttggtaaatacgctttgcctaaatgggagatcaatggtctggttgagtatgtctctgggggtcc

SEQ ID NO: 48204 - DNA, 277 bp, Glycine max
  Clone ID: 701037165H1
gtgataacttgcatcatatcaaaatctttgggcaagatagggagcttaattaaagtcctaattaaggatcatggaatcccaaacacagtctgagctaccagttgtagacttcaccaacaaaaatctgaaaccgggtactgatgcatgggtttcagcttctcaagtagtgcgtggtgcacttgaggatcatggtggtttcttggcactctatgataaggtcagtttggagacatacgactctgtttattctgaaatgatgaatttttttgacctctca

SEQ ID NO: 48205 - DNA, 274 bp, Glycine max
  Clone ID: 701037166H1
cttttcttacttaagacattgtggctatctgtgacatctcgggttctttttgtacttgtttttggacttgatactgatctattatttaattttttagaatgccttcattttggcttatgctcttttggatatctttgattaacttctcatacaaatgctgctccattaattaagtattgttttactcacattggtttcaaacatcgacttgattaattaccctctcctcatatagaaaagtatttactgtaattgtgtgttgtatcacacatgt

SEQ ID NO: 48206 - DNA, 272 bp, Glycine max
  Clone ID: 701037167H1
ggctcgttcttgaaaccctaattcgatatcctcctcctcagaagaagaaggatcgatgtgggcagcttcttgcctggcgtcatgctgcgcggcctgcgcatgccacgcctgcaggaccgtcgtatcgggaatcagccgccgttccgccaggatcgcctactgcggcctcttcgccttctctctcgtcgtcgcctggatcctccgtgaggtcgccgctcccctcatggaatcccttccctgcatcaatcacttcaaacacacacctagccgtg

SEQ ID NO: 48207 - DNA, 267 bp, Glycine max
  Clone ID: 701037168H1
atggaatctgacctccatcaagtaatcaaggcaaatgacgatcttactcctgagcaccatcagtttttcttgtaccaacttcttaggggcctgaaatatatacatacagcaaatgtgtttcatcgtgatttgaagccaaaaaacattcttgctaacgctgattgcaaactaaaaatatgtgattttgggcttgctcgagtttcatttaatgatgctccatcagctatattctggactgactatgttgcaactcggtggtaccgtgca

SEQ ID NO: 48208 - DNA, 266 bp, Glycine max
  Clone ID: 701037169H1
tgctttaaaccgatttcttcaggagaaacatggttctaagatggcctttttggatggcaatccccctgaaagactttgtatgccgatagttgatcatattcagtccttgggtggtgaagttcatctaaattcgcgcattcaaaaaattgagctaaatgatgatggaacggtgaagagcttcttactaaataatgggaaagtgatggaaggagatgcttatgtgtttgcaacacctgtggatattctgaagcttcttctaccagaca

SEQ ID NO: 48209 - DNA, 267 bp, Glycine max
  Clone ID: 701037170H1
ggaaattcctgctttggttggaattgccttgcaccgtggttttcctatcctagccgtactgctattcgtcgcaggttcaatttagagggcagttgcgaacacttaatagatcatgcggatgctgcggaagcattttggaagatgaggtgcagcgtgaacagtgtgagtcaacatgtgacttggcaactcatgtcttctgtcatgtatgtgctctttgtcaagaaggtcgtgagctccgtcgcaggttacctcatcctggctttaatg

SEQ ID NO: 48210 - DNA, 266 bp, Glycine max
  Clone ID: 701037171H1
gatttccctcatactgagtagtgttctgaattgtgctttttgatatcttaagccatttcagcaacatgagtaaccacactcgcgcgctaccaccagcagctacccctaagatgcagcaaaggaaggagcgacaaaggttctccacttctgatgacagtgccatgaccaagcaagttcaggccactcatgcccctgatggtcgtgaaattgatgtcaaacccattctccaaattgtggatgacatatggttcggttcatcgctcgca

SEQ ID NO: 48211 - DNA, 265 bp, Glycine max
  Clone ID: 701037172H1
ctctcctctaacttgtaagcaccataccacattatctctctttcgtttcctttcccttctcactctttctctatctaccctttcccttccatccattagagagtggaaaacatcatccatgtgttcatatcatgttaggtcatggatacaagagctaccactctttgttaatttcttcttaagaccaatctgtgaaaggtttgacttttcttgtcccttgaatcccgagaacacaagccaaatcaatctcctattgctaacataa

SEQ ID NO: 48212 - DNA, 253 bp, Glycine max
  unsure (1)..(253): unsure at all n locations
  Clone ID: 701037173H1
gaaactaacacagaaagagagagaaagagtggttgaaagcgtccattgaaggtatagagagagaggttttgtgaattggtgctgcttcgtgtctgtttatttcctcgcgaggtttgaatcccggaacagtgaagagaaacggaggttccgatcctgcgatgtgatatatgagagatctgtcaggaaattgtcctgganaaaaaaaatggcgatctacgaggtatccatcagccgaaattcggtgaacggaaaa

SEQ ID NO: 48213 - DNA, 262 bp, Glycine max
  Clone ID: 701037174H1
gcccgatcaaacaataaggttgttattggtccagccactgttggaggcattcaagcaggtgcttttaaaattggtgacacagctggaacaattgacaatataattcagtgcaagctctacaggcctggatctgttggatttgtttctaaatctggtgggatgtccaatgaactctacaacactattgcccgtgtaactgatgggatttatgaaggcattgctattggaggagatgttttccctggttccacactttctgacc

SEQ ID NO: 48214 - DNA, 265 bp, Glycine max
  Clone ID: 701037175H1
gcgtcttcaaattagggttagggttagggtttttttgttacaaataaaattcctattatgcttctgcttttgtgtgtgtgtttgtgattttataattattcataattgtgtgttgaaaatgaaagccaatttgcagagcaagggcgtcgactatgaatgtcgcatcttgccttgaaggttggcgaaaacaatgacgattctccgtgcctatcaaatttactctgttttgatgatggcctcgaacaagtcgcaacattctttttat

SEQ ID NO: 48215 - DNA, 264 bp, Glycine max
  Clone ID: 701037176H1
aaattagagaagtcgacggctgccacagcttcttaagcttctgaatgtacattattactgctgcattttttaattctcaagttccctgttacccattctttaggagaatcagagggttgcctatatttgaggcatttgtcggctttgtggtcgccagttgttggtctttgatcatgaagagtttgcagttttgaagtgctcggagctctgtgcaccgaagttgccattgtccagagagaggattgcattcgaggaactgtggag

SEQ ID NO: 48216 - DNA, 265 bp, Glycine max
  Clone ID: 701037177H1
tccaatcctgctttcctttcttatcttcccatgacactttgagagttcaagtttccttttctttcctacaaatccaaaataatagttttagtttacaaaatggctgtggaactcatggggttcccaaaactagacgaacaaaaggccattcaagaagccgcatcagaaggcctcaagggcatgaaacacctgatccgaaccctttccaaccaaccctctcacttaaacaccgaacttaccgacgttaccgtttcaaagttcaaga

SEQ ID NO: 48217 - DNA, 261 bp, Glycine max
  Clone ID: 701037178H1
atttgaagttgcttcctgtatgagatactgtagccgattattgcggaatatacctatgacacctgagtctgcattgctttaccttgagcttccttctactgtcttaatggctgatgcagttcaaccattgactgatgcagcaaagcagtatcttgccagtcgatacaaagatataacaaagttccaggaagaggttatgggcttgcctctagctggaatagaagcaatattgtctagtgacgaacttcaggttgcatcaga

SEQ ID NO: 48218 - DNA, 276 bp, Glycine max
  Clone ID: 701037150H1
ttttggctctttcattctttgcttaattcctatggaggagtttcaaagatcaaggtcttatgcaaatgggcaaatgatgcagatagagagctactatggagctcctaggccttatgatcttcagtctcagaacttatagtgcttcttatgcacaaactcaaataggtcctcctagggacttgaagttgaagaaaggaaaaagcatttctgcagggtcttctttctccaagtcttggagctttgctgatcctgagcttcagaggaagaagagggttg

SEQ ID NO: 48219 - DNA, 275 bp, Glycine max
  Clone ID: 701037123H1
ttccatttgactcttgttctgaacgacttttcaagagaatcaaaccatggcagtgaaagtatacggtccccactgtgcttccaccaagcgggtgctgctttgtctggttgagaaggaagtcgaatttgaggttgtccctgttgatgtcactaagggggagcagaaggatcctgagtacctcaaactacagccatttggagttgttcctgtcatcaaagatggagattataccttatatgaatctcgtgctataatgaggtattatgcagaaaaat

SEQ ID NO: 48220 - DNA, 277 bp, Glycine max
  Clone ID: 701037124H1
caagaatggcaatgcgtgtgtctccttcagcttcaagtgcactctctctcctaaactgcaagcaaccacctccagtttcatgcatccgtgtaccttgtctctctcgctcctcgccgccatcgctctcctacaccttcaatcctcttaggtccttcatcggtcacggcggaagcagaagcccagggtttcgtgtccattgctacgctcctgctcctctcactcctcccaatctgcaatggatctctaccatttcctcagtggttttgatactggcgag

SEQ ID NO: 48221 - DNA, 263 bp, Glycine max
  Clone ID: 701037125H1
gactgagcgaatcggctcgagagagaaggttgatgagattcgtgcgcttcttgggaaagtacgagggtgatccattgagaatagttggtgtaggagctggtgcttggggtagtgtgtttattgctatgctgcaggaggcttatggtagtttaagagaaaaagttctgataaggatatggagaaggccgggaagaatggttgacagggccacggctgagcacttgttcgaggtgatcaattcaagggaggatgtactgaggaga

SEQ ID NO: 48222 - DNA, 276 bp, Glycine max
  Clone ID: 701037126H1
tttcaagaagcatctgagtgtttactattttgtactatatttatatatagtcactcaagcttctaggatttctgcctgctgcatcaaaatgggaagcaacttgaggtttttgagtctttgcctcttggcattgattgcatcaactcatgctcaacttcagcttggtttttatgctaacagttgcccaaaagcagagcaaattgttttgaaatttgttcatgaccatatccacaatgctccatcactagcagctgcattaataagaatgcactttca

SEQ ID NO: 48223 - DNA, 273 bp, Glycine max
  Clone ID: 701037127H1
ccggtaaccgtgtgtttggtgcccttaagggagctctggatggggggttggatattcctcacagtgataagaggtttgctgggtttgataaggaaaagaaggagcttgatgctgaggttcatcgcaaatatgtttttggtggacatgttgctgcctatatgaagatcttggctgaagatgaaccagagaaataccagtcacacttcagtgaatacatcaagcgtgggatagaagctgatggtattgaggcactgtataagaaggttcatgccg

SEQ ID NO: 48224 - DNA, 274 bp, Glycine max
  Clone ID: 701037128H1
cgcgatgccggaggaagaagtagtggagctcaagttccgtctctacgatggatccgacatcggtcccttccgttactcccctgcctccaccatcgccatgctcaaggaccgcatttttgcagactggcccaaagacaagaagattataccaaaagcagcaaatgatataaaactgataagtgctggcaaaattttggagaaccacaagacagttggccagtgtagagtaccttttggcgagcttcccaaagggttataaccatgcatgttgtgg

SEQ ID NO: 48225 - DNA, 273 bp, Glycine max
  Clone ID: 701037129H1
cttcacattctccattccacaacatcaaggttctgatcatgtcggggaagaggccccggccaatgatcggaaagttgtcggagttgttggtctcgagaggccgcacggtggcacttttggacaccactggaagcccaagaggcccattagacatgcagatgatgcaatcaccaagaggcttaaaaaattatgatcttggtggcgttggtcttggaattgtggtggctcttgataaatccaataacgaggttgctgcacgtgaagttttgccca

SEQ ID NO: 48226 - DNA, 271 bp, Glycine max
  Clone ID: 701037130H1
attacccaataagaagcaactctcaatttctgacatttcttcaatcgagtgtttccagtggtatcatccaagaggaacgtaggggaagataaagagatgacgataaaacctgttgttcgtgtttcggaggggaagctggtggtgaaggagcgaacgattttgaccggaatgccggagaacgtggtggagacatcgacggtggaaggaatgtttctcggagtggatttcgagaaggaagacagtaggcaggtggtttcgttgggaacgttga

SEQ ID NO: 48227 - DNA, 278 bp, Glycine max
  Clone ID: 701037132H1
gggtaaggtcgcgttgtgttgcgtcgtgtcgtgcgctgttcctctgtttctcgtttttgtgttcagaccgaaccctagctccgcatcgcaaccatgtcgaccaagcaaggtggaaaagctaagcctttgaagaaacccaagtctgataagaaggattacgacgagattgatgtggctaacattcagaagaaaaaggaagaggagaaggcgctaaaggagttgaaagccaaggcgcaacagaagggaagctttggaggttctgggctcaagaaagtgga

SEQ ID NO: 48228 - DNA, 280 bp, Glycine max
  Clone ID: 701037133H1
gtcatctctaacttggtggaagccagaaataacattcctgctccatttgacaacatcactacgctacagacactctttgccaaccaaggacttgatttgaaggacttggtcctgctctctggtcgtcacacaattggtatcgctcattgttcatcattatcaaaccgcttgttcaatttcactggcaagggtgatcaagacccttcactagacagtgaatatgctgcaaatctgaaagccttcaagtgcaaggacctcagtaaattgaacaccacaaaaa

SEQ ID NO: 48229 - DNA, 282 bp, Glycine max
  Clone ID: 701037134H1
agacagaccatggcaacaaaacctcgtttggcttatctccctgccatttttgctcttcttctagttgtcttcacttctgtgacggcacaatccccagggccagaatcttcatcactccacgacaccttccttcaatgcctcaccaaatacacaacaaactcctcatctcaactctccaacatagtcttcgctaacaccaaccccaagttccccactgtcctccaaaactacatccgaaacgcgcgtttcaacacctcctccaccccaaagccttcactcatc

SEQ ID NO: 48230 - DNA, 276 bp, Glycine max
  Clone ID: 701037135H1
aattctgaatttgcgggttttggatttggacttggtcgtcaacacagtctaattaatatctttttgctccttcgcttatgaatcttcttcttcttcttcttcttgttcctgcaacgcactgaattcgatcaatcaatccatcttcaattgctttgtttcgatcggaggaaaatggccgatcagttatcgaagggagaggaattcgagaaaaaggctgagaagaagctcagcggttggggcttgtttggctccaagtatgaagatgccgccgatctc

SEQ ID NO: 48231 - DNA, 274 bp, Glycine max
  Clone ID: 701037136H1
gaaggccttcaaagcatactataagcttcgtcttgaacgcaccaacaaacgccaccatggtgcccgcctaaagaaggctgctgaagcagagaaggaggacaagaaataaggtccttgagaagacagtttgtaatccatattatagttgtgagaaatttttgtttgatggtctgcgcccttagctttatggagatcatgagttttaaagcaccacccttacaatttttgtttgaactcaagtctgttaatttaattagcactctggtctgttttg

SEQ ID NO: 48232 - DNA, 274 bp, Glycine max
  Clone ID: 701037137H1
cacaactactccttataaccaaaaccaacaacaactatggcaagttatcagaagcactacgatgatcagggtcgcaaggtcgacgagtatggcaatgttgagaggcaaactgacgaatatggcaacccggttcatgccactagtgtcacttatgtagccaccaaaagtgttggtggctacaatgatgacgctaataagcaacatgatattactggtgtctatcccgaaaaagacaccggtagacatcattttggtcgtggttacgacggtgaca

SEQ ID NO: 48233 - DNA, 273 bp, Glycine max
  Clone ID: 701037138H1
cgagaggcgttctatatattattgaattgacaatgaggcctgctcttgctttgcttcctcttctatttgctttcttgttagctgccactacagaatcaagaaaagatacaggggaatattggaaaatgatcatgaaagatcaggaaatgccagaaggacttcaaggtcttgtttcatttcaatctgaaaataaccctaagactcaagagcagcttggtaaaggttccaaaaaccattgtgaagagtctctagttacaaatacacaagttaata

SEQ ID NO: 48234 - DNA, 269 bp, Glycine max
  Clone ID: 701037139H1
aggaagtctcttcctacttgaagaaggttggttacaacccagacaagattccatttgtgcccatctctggtttcgagggtgacaacatgattgagaggtccaccaaccttgactggtacaagggaccaactctccttgaggctcttgaccaaatcaatgagcccaagaggccctcagacaagccactcaggcttccattgcaggatgtctacaaaattggtggtattggtaccgtgccagtgggacgtgttgagactggtgtcgtgaag

SEQ ID NO: 48235 - DNA, 101 bp, Glycine max
  Clone ID: 701037140H1
aattaagattggaaatgagaaaatagacggaagtgagagaggaggcactgagcatccaacaatggccttgttctctgctaccgcaaccgttcttcctcgga

SEQ ID NO: 48236 - DNA, 89 bp, Glycine max
  Clone ID: 701037142H1
ctcgagccgctcaatgtgaatttgggccgaacacccgtctctctccgggacagttcttctgtgcagagtacactactcttctccatcaa

SEQ ID NO: 48237 - DNA, 268 bp, Glycine max
  Clone ID: 701037144H1
ggatgatatccggtcattggaacgtgaccgatgtctgcaacgcgctgttaggcggcttcgccgccataacagccggctgctccgtcgttgagccatggacagccatcgtgtgtggttttgtcgcttcagtggttctgatagcgtgcaacacattagcagagaaggttaaactcgatgatcctttggaagcggcgcagttacacggtgggtgtggcgcgtggggggtgatattcacggcgctgttcgcgaaaacggagtatgtgagcca

SEQ ID NO: 48238 - DNA, 272 bp, Glycine max
  Clone ID: 701037145H1
aattaacctcactcaaactcgggatcacagaaaccaacaacagttcttgcactgaggtttcacgatgttgctggaacttgcacttggtttgttctgtgttagctttgtttctgcacttgcgtcccacaccaagtgcaaaatcaaaagcacttcgccacctcccaaaccctccaagcccaaagcctcgtcttcccttcattggccaccttcacctcttaaaagataaacttctccactatgcactcatcgatctctccaaaaagcatggcccc

SEQ ID NO: 48239 - DNA, 269 bp, Glycine max
  Clone ID: 701037146H1
gtgttcttttcctccttcatttgttctccctgtagtgctcacgaagcacttcaagatcgaatgcccaccaaagcaaaaccacatatctctccaaaggccgactcttttcgccctttataaccaaatcaagaaaccccagatctcgggtatagctggtgatcttgaatttctctgtcttctgtctttctttaatttcttctcttttctttgaccattacattcccggaaaacggttttccggggaaagaagtgaacgaagggcacaattg

SEQ ID NO: 48240 - DNA, 270 bp, Glycine max
  Clone ID: 701037147H1
caagtgaccaccaatattccacaggctatgtgaccaaaaagtcccctcctccacctgtggagtttcctacctcaccacaactcatatttggggaggagattcttcacttcagccaccctcagcaccctctctcaatggtggatctccctgacctgttcaattgtgtggggtgcaaagagtatggctctggaaagaggtttgtttgccagcaatgtgattttcagctgcatgacttctgtgccttggctcctcctgctctcaaggcacacc

SEQ ID NO: 48241 - DNA, 273 bp, Glycine max
  Clone ID: 701037148H1
gttgtttggagcgatccgagaaaaactctgtaaacatgttggtttaccaggacctccttacaggtgatgagcttctctctgactccttccgttacaaggaaattgagaatggaatgctgtgggaagttgaggggaagtgggttgttaaaggagcagttgatgtagacattggtgcaaacccttctgctgagggtggaggagaagatgagggagttgatgatgcagctgttaaggttgttgacattgttgacacattcagacttcaggagcaac

SEQ ID NO: 48242 - DNA, 274 bp, Glycine max
  Clone ID: 701037122H1
tctctctctctctctaacacggagtgatggctgtgcagctgtgggaaaccctgaaggaagccatcgtagcctacactggcttctctccttccaccttcttcacggtgctggcgcttctttttgccgtttactacgtcgtcacgggtctctttggctcctccgacgatcaccatcaccgccaccgccacgtcgaggaggaggaggagatgccgcctctgcgccccccggttcagctcggcgagatcacagcggaggagctcaaggcctacgacgg

SEQ ID NO: 48243 - DNA, 280 bp, Glycine max
  Clone ID: 701037149H1
ccgagaatggaaacagacctaaacagagggtaacaaaacaagcaaacaccatggtgattaagtctgtgttgttcagcttcattttccccccgccaccttctctggtggtttgggggttgactgtgacaagcttcctgatactggctaatgctttcttgtcagaaattagagggaagcatttgaactattcaaagttttggaatgctaatccctctgcagaaaagcaggtcaagttgtctagcaaagctggcatgcttttgctgtacactcctgcttttct

SEQ ID NO: 48244 - DNA, 253 bp, Glycine max
  Clone ID: 701037092H1
gttgaatcgcgacgaagatgaagaccgaatcgcgttcgaaagaggaaacaaagacgtatcaggaatggcttaatttggcagattcagatggagatggtcgaatctctgggaacgacgccacaaagttcttcgctctctccaacttgtcgcgctcgcaactgaagcaactctgggctctcgccgatgtcaaaaggcaagggtttttgggcttcacagagtttgttcctgcaatgcagttggtttcgctagcaca

SEQ ID NO: 48245 - DNA, 253 bp, Glycine max
  Clone ID: 701037093H1
ctgaattctcttgttgcagagtaacacatggctctgttattcaaggatccgtcgaacatttcagcgtatcgagatagaaggttccccggaacgcaagaggcgtttgagcacgcgcttgtgacctcaaccaccgtttacgtggggaacatgtctttttacacgacggcggagcaagtttacgagctcttctcgcgtactggggaaataaaaacgatcatcatgggcttggacaagaacaccaaaacgccctgcg

SEQ ID NO: 48246 - DNA, 256 bp, Glycine max
  Clone ID: 701037094H1
gttgcggactgagtggtgtgtcgcgttgttgacattagaatttgatcgatttggggttggggcggaagaaagtggaaacgacgccgttggaaggtgggaagaagatgagttcgcagcaaatgcaaatgcaaattcaaatccaaaacagtggtggtggcagtggcaacaacaacagcagcaacatcccagtgagcgaggttttctggactctcgtcgacaaagccgacaaaaaattctccaaaatcagagaccttcc

SEQ ID NO: 48247 - DNA, 259 bp, Glycine max
  Clone ID: 701037095H1
cactagtaatattattcttcgaatccattttattattcataatgggtattttcacatttgaggatgaaaccacctcccctgtggctcctgctaccctttacaaagctctagttacagatgccgacaacgtcatcccaaaggctgtcgaagccttcaggagtgttgaaaaccttgaggggcacggtggccctggaaccatcaagaagatcactttcgttgaggatggagaaagcacgtttgtgttgcacaaaatagaatc

SEQ ID NO: 48248 - DNA, 289 bp, Glycine max
  Clone ID: 701037101H1
ccaatacggaacccaaaattagctcgattaaatccaaatctgagagaagcattgattggtacggtaatggcggaagggaaggaagagagtaaatctagcgaggaaagtgtgaagctgttcgtagggcaagtgccgaagcacatgaccgaacccgaactgcttgcaatgttcaaggagttcgcgctcgtcgacgagtcaacataatcaaagacaaagcgatcgtgcttcccgaggttgttgcttcgtaatttgtccgtcaagggaggaggcggataaggccgtcaatgcg

SEQ ID NO: 48249 - DNA, 279 bp, Glycine max
  Clone ID: 701037104H1
aatttgtgctccaacacaaaaaaatgaaacctacaatcaccattctcttgttgtctctactacttctcataacttcaccctccttggcaacccgacccgcatccaaccctgatcaagtcaagcacaacaaaaacaacaaccaaggtggtggtgctggtgctggtgctggcgggttctttggccctggaggagggttcagcatacccggttttggaaacgggtttggaaatggcatcataggaggaggatacggatccgggtatggaggtccgaatggag

SEQ ID NO: 48250 - DNA, 280 bp, Glycine max
  Clone ID: 701037106H1
taagaaaagagctttaagggtgattgctgagcatttgacagtagaagaagctgctgggctaaaagagggattccagcttatggatacaaacaacagaggcaagattaacattgatgaattacgagtagggttgcataaacttggtcatcaagttcccgaatcagatgtccaagctcttatggaagctggtgatgtagatggggatgggcacctagattatggagagtttgtagccatttctgttcatctgagaaagatgggaaatgatgagcatcttcgc

SEQ ID NO: 48251 - DNA, 272 bp, Glycine max
  Clone ID: 701037107H1
cttaattgtggagacacaacatcatggattctcctttgttgtcacaagaccatgttttgcccaacaaacacacatggaagatgagcctttgtgctatcgtggctatcacaattgttggactagtagtcagaggcaacactagctatggaatactgtccggagcagaaaaatataatgatggaatcgcaaccaatcagggagatattgttgaatcagatgtgggagttgttgcaaccgatgatgctcggtgttctgcaattggtgtttcaatg

SEQ ID NO: 48252 - DNA, 278 bp, Glycine max
  Clone ID: 701037108H1
gaaaacttgggagggttttataggggcatctgttaccaccatcatctctgcatttatgcttgctaacatcatgggtcgctctcagtggctaacgtgtccaaggaaggatttgtcaactggttggcttcactgtgatcctggtccactgtttaagccagaatcttatcccttacctggatgtatttctcactggttctcttggaaagagatatcaatcctaccaattcaatggcattctttatgtctaggcttgtttgcttcaattattgcaccttttg

SEQ ID NO: 48253 - DNA, 280 bp, Glycine max
  Clone ID: 701037109H1
gatatccatctttgcttatttttttctctcccaacatttccagagaatgaaatcaaaatatattaaagagtagcttatatatttgttactttttcttttttttggagaaaatatatatatatatttgttacttattagtaagtcaatgtcaaacatgagacacccctcggttgtatgaaatgaaggagatgttacaagacccaaaaggttgattcaatagctcattactggaaataatcatatggtaaataatatatctttgttctattgactccctaaa

SEQ ID NO: 48254 - DNA, 275 bp, Glycine max
  Clone ID: 701037110H1
gctcgctcttctcactcgtcatcttcgaattcgtctgcgccctaacaaaattcatttcaattccaactcctctgatcaaaatcctaggctcgttcttgaatccctaattcgatctcctcctcctcctccgaagaataaaaggaggatcgatgtgggcagcatcttgcctggcgtcgtgctgcgcggcctgcgcatgcgacgcctgcaggaccgtcgtttcgggaatcagccgtcgttccgcccggatcgcctactgcggcctcttcgccttctcc

SEQ ID NO: 48255 - DNA, 277 bp, Glycine max
  Clone ID: 701037111H1
ctgcagagtatgggttggatgctccaacattaaatgcaactggtccttatggcaccctactgaaaggggatgttctatctgcaattaagtcaggaaaattgtctccaaaacctgcttcatctaaagaaaaggcattgtcatctcaaagtcatcaacaagttgcagcttcccaagagtcaaaatctgacttaaaaaagtcagatgcttatgaagattttcctaatagtcaaattcgcaaggtgatcgccaagagattattggactcaaaacaaaatac

SEQ ID NO: 48256 - DNA, 275 bp, Glycine max
  Clone ID: 701037113H1
cctcgagccgaatcggctcgagaacagagcaaagagagagtgtgcgacaagtgaaacaaaaaacagaacaacaatggcgacacttaaggttcctcagcctcttccccccgttgcagatgattgtgagcagctccgaaaagccttctcaggttggggaactaacgaggagctgattgtatcgatcttggctcataggaatgctgctcagaggaagcttatcagagaaacttatgcccagacctatggagaagatctcctcaaggccttggacaaag

SEQ ID NO: 48257 - DNA, 275 bp, Glycine max
  Clone ID: 701037114H1
gctgaatggaggtgttgcagttgctggcttccgattttcccctccgccattccctttccaagcccaccgtctcccttcctcccactcactcactctccgtcgtcgtgttccggcggcggagatcaccctgcggcgggcggtggtgggctccgcgagcatgcgcggtggaggtgtcggagtcggagggagcgaagatggtgatggagctggtgggagccttcaacgagttgacggagagaatgaacgtgctgtcgacgagctcttcgcgtcttctc

SEQ ID NO: 48258 - DNA, 277 bp, Glycine max
  Clone ID: 701037115H1
tttctatatagctaaagaaagtgatactattaagcataattaatataatggggtacatgtgcattaagatttcgttttgtgtgatgtgtgtgttggggttggtgatcgtgggtgatgttgcctacgctcaagattcagcagaagactacgtgaatgcacacaatgcagcacgagcagaggtgggttctcaatcaccaagacaaacagtgattgttccaagtttggcttgggatgatacggttgctgcttatgcagagagctatgctaatcaacgcaa

SEQ ID NO: 48259 - DNA, 279 bp, Glycine max
  Clone ID: 701037116H1
cattttccctcactttctcgctccccaaacgcccctctctctcctccaatggccgaccagctcaccgacgaccagatcgccgagttcaaggaggccttcagcctcttcgacaaggacggcgatggttgcattactaccaaggaacttgggactgttatgaggtcacttggtcaaaacccaactgaggcagaactgcaggatatgataaacgaggttgatgctgatggcaacggaaccatcgatttcccagagttcctcaacctgatggctcgcaagatg

SEQ ID NO: 48260 - DNA, 285 bp, Glycine max
  Clone ID: 701037117H1
ggtttttgttagtgcagaaacagagaaagatggatgaggagaatggttacagtgggagtatcagctctaacttggagactacaaaagcagagagatctgtgtggctgatgaagtgccctttggtggtggctaagtcatggcagacccatcctccttctcaacctctcgccaaggttgtgctctcccttgatcctctccaccctgaagaagacgatccctctgctgtccagtttacaatggagatggcaggcacagaagctgtgaatatgtccacaacttattcat

SEQ ID NO: 48261 - DNA, 282 bp, Glycine max
  Clone ID: 701037118H1
caccgcctccactaatggctatgagatcgtgggtgagtcgaggatccgtgactcgtttgatggactcagcaaatcgaggggctttcagtcgcttcttcagcgacaagggtcgcgttctcagcgaggaggaacaggccaaagaaaacgtctacatccagaaatgggagagggagaggttggagaaacagaagcaacaggctgagaagaccaaggcagacaagggcaaagatgctgctgctgataagaaacctgaaggttctcaaaagggctgagtttatcctt

SEQ ID NO: 48262 - DNA, 273 bp, Glycine max
  Clone ID: 701037119H1
aatggacaggcttgtcattcttcctttctctgctggttgcatctctgaggccagtgttgctgttggtgttccacatccacgaagatcaaaaccagacaccaatgcatcacctcctacaataaaacggtctaaaagcgtcgaggattcagagattttgtctggtgaaagcatgaagaactcgttgaggctgctagacgttgttccaaagtctaacctatcctacggcttcaatagactggtcaagggtttcaagaattcttctcaattgtttgt

SEQ ID NO: 48263 - DNA, 279 bp, Glycine max
  Clone ID: 701037120H1
ccttgagctttgtcgcaggatcatccgttgatgaacttggtgacaccactgctgagctcaagctatctattttccagcttggaatcagtcctcagataatagcatccattattatgcaggtactctgtcatgttgtcccttctttagtaaagctacggaaagaaggtctggatgggcatgagaaaattaagagttatatatggtggatgtcatttggctttgcaattctggaagctttaatagttgcttgctactcacttccatattcaatttatgctg

SEQ ID NO: 48264 - DNA, 269 bp, Glycine max
  Clone ID: 701037121H1
cggctcgaggtgacagagagacaaaagaaaagatgtcagggcctcaatgctgttcaaatccaccaagcttgaaccccggtggaggagttgggcatgtggacaaagtgggtggtgttgattcctatttcactggatctcctcactccaaactcgctgttcttatgctctccgatgtttttggatatgaagcgccaaatttaaggaagcttgctgacaaagttggggctgctgggtattatgtagttgttcctgacctcttggatggcgaa

SEQ ID NO: 48265 - DNA, 240 bp, Glycine max
  Clone ID: 701037090H1
atcccacggtaaagctaaactacgagagaatcataagatttaagccaacatacaattagaaacaaacacagaaaagaaatgacttatttctagctcctagttatttgttttttttttcatttttttaagaactaagaaaactagtcctatagaggacatgtaattatgttcaagatacttatgttgaatgtggccaactcttggatgaccacgtggaataatacttttatttattttttt

SEQ ID NO: 48266 - DNA, 257 bp, Glycine max
  Clone ID: 701037060H1
acaccacacaccacacacatagtagctattatactctctagagtaattgcggaatctgctagaattttctaataatggcgaaagacgttgagcaggtcacagagcaaggtgaatactccgcgaaggactaccatgaccctcctccggcaccgttgatcgacccagatgagctcacaaagtggtccttgtacagagccgccatagctgagttcatagcaacactcctttttctttacatcaccgtgttgaccattatt

SEQ ID NO: 48267 - DNA, 257 bp, Glycine max
  Clone ID: 701037061H1
ggacggtggaacattcgctctttattcgctgctctgtaggcatgccaagtttaatttgctccccaatcaacaagcagctgatgaggagttatcatcctataaatatggtccctcttcacaggctatagcctcttctcctctaaagacgtttctggagaaacataacaggttaagaacagccctgcttgttgtggtattgtttggtgcttgcatggtcattggtgatggtgtgcttactccagcaatttcggttctag

SEQ ID NO: 48268 - DNA, 263 bp, Glycine max
  Clone ID: 701037063H1
accaaaaccaatcggatcgtttcctctgcggcgtcagaaatccatggatccctacaagaatcggccatcaagcgccttcaattctcccttctggactactaattccggtgctcccatctggaacaacaactcatcgctgactgttggatctcgaggtacggtatggtattcaatattattttctctacttcatgatcacattttttcatccagatgactctaacccaagactttacttaacaacttaagtcaggaccactcgg

SEQ ID NO: 48269 - DNA, 264 bp, Glycine max
  Clone ID: 701037064H1
atcggttctaaatcttcagtgtctgctatctaactgtccagcgcaaaactgctcctagatgctacctcaactttgcgtattacttttgtttagggtgtagttttagtgtgtactagttgagtgcaatgctgtgggctatgaatgatgctttttcgcacccaataatggtataaatagccctacgagaagtgattgtcacatctattttgtattgttgtcttcaataaatttggacttctaaaaatcctaatagccggtgcaaat

SEQ ID NO: 48270 - DNA, 134 bp, Glycine max
  Clone ID: 701037065H1
caacggttgctctgctctacgtaaaggacaagcaagtcgaagcacgggccttggatgacgccacgcaaccctcgtgcttctttcagcttttcggtgctctgaaagagctcaagagaccgatctggatgctgatg

SEQ ID NO: 48271 - DNA, 267 bp, Glycine max
  Clone ID: 701037066H1
acctgccattattgtaagtaagaattgggaaaggaaggaaggagatgaatctccctatcatagatctgtcctcacctgatcctctttccactgccatttccatccgtcaggcgtgcattgagtatggtttcttttaccttgtgaaccatggcgtggagaatgacttggtcaaagcctttgatgagagtcagaggttcttctcacttccaccaggagagaaaatgaagttggcccgcaaggaatttagaggttatactcctcaggatc

SEQ ID NO: 48272 - DNA, 132 bp, Glycine max
  Clone ID: 701037067H1
cgagtctaggtgccctccttataccaagaaacgtttgattccagattccactgtcatttctacccgccatgcctctttgagatcagcaaagaagcttattgaaactagaggaacatctgttgatgtagctca

SEQ ID NO: 48273 - DNA, 88 bp, Glycine max
  Clone ID: 701037068H1
cttggccaagtgaataaaaaatgtgtcaaatatgtcctatttcttattcccttttaccatttcaagttgcttagagatatgtgttttt

SEQ ID NO: 48274 - DNA, 259 bp, Glycine max
  Clone ID: 701037069H1
caaaagagaccagtgtgcagtgagaaagaggttggtcacttcttgtgtggctttgttttgttctttgtgttggaatttgttgatgggtgaagagggagaagaggtgtcaagagataaggaacagcaacacatgggagtttatggaaatgagtggttgtttagtagtttctgtgcaaattggcgccgtttaagacaccagaattcctgttctatgcctccttttgagtgacaaaaaaaaaacatcaaaacaaaaacttgt

SEQ ID NO: 48275 - DNA, 258 bp, Glycine max
  Clone ID: 701037070H1
cagaatcaaggttaggtattgtgacggttcatcatttactggtgatgtggaagcagtgaatccagtgactaagttgcacttcagaggaggtaggattttcaatgctgtcatggaggatttactagcaaaaggaatgaaaaatgctcgaaatgctattatctcgggatgttcagctggaggattaacatcagtactgcattgtgatcgatttcgagctctattacctaggggagctagagtgacatgcctctcagatgc

SEQ ID NO: 48276 - DNA, 257 bp, Glycine max
  Clone ID: 701037071H1
tgggtattttcacatttgaggatgaaaccacctcccctgtggctcctgctaccctttacaaagctctagttacagatgccgacaacgtcatcccaaaggctgtcgaagccttcaggagtgttgaaaaccttgaggggaacggtggccctggaaccatcaagaagatcactttcgttgaggatggagaaagcaagtttgtgttgcacaaaatagaatcagttgatgaggcaaacttgggatatagctatagcgtagtt

SEQ ID NO: 48277 - DNA, 252 bp, Glycine max
  Clone ID: 701037072H1
gtgacaaacacaaacacaatcaatggcgaacgtcacagcggcacccccgcggtcgcaccgaagcccgcgtgggtcctcccgtaccgaaccgagaatctgcgcgaggtctacactctgtcccgaaaactagggcagggtcaattcggaaccacgttcctctgcacgcacaagggcacggggcgcacctacgcctgcacgtcaatcccgaagcggaagctgctctgcaaggaggactacgacgacgtgtggcgg

SEQ ID NO: 48278 - DNA, 252 bp, Glycine max
  Clone ID: 701037073H1
gctaaggagactgggttgaagagacaaattcttgttgggttttgatgccgggagatgtgtaactcatttgtgatatctctctgtattttgtaatattagcattttcttcccgattttgtacttccaagtgattcttgcaccttaaaaacaaacgattaactactgtaaattatattaaatgctggtgctgatgaacacgattggttataccaaaaaaaaaaaaaaaaaaaaaaaaaaagggggggcccccta

SEQ ID NO: 48279 - DNA, 247 bp, Glycine max
  Clone ID: 701037075H1
ggtttgtaagagacagacaaaagaggcgcaagatgagtggtagggtttctgggaaggtgaagtggttcaacgatcagaaggggtttggatgcataacccctgacgatggcagcgaggaactcttcgttcaccaatctcagatcagctctgacggtttccgaagcctagctgaaggagagtccgttgagttcgctattgaatctgaatctgacggacgcgccaaggctgttgatgtcactggccccga

SEQ ID NO: 48280 - DNA, 252 bp, Glycine max
  Clone ID: 701037076H1
ggcacccttgccaattgggttcgctgtgttcttggttcacttggcaaccatccccatcaccggaactggtgtcaaccctgctcgtagtcttggtgctgctatcatcttcaacaaggaccttggttgggatgaacatggatcttctgggtgggaccattcatcggtgcagctcttgcagcactctaccaccaggtcgtaatcagggccattcccttcaagtccaagtgattcaatcaaacggttcatgcttaa

SEQ ID NO: 48281 - DNA, 254 bp, Glycine max
  Clone ID: 701037077H1
gctagatctccgctccggcggccacctcacccacggctactacacctccggcggaaagaagatctccgccacctccatttacttcgagagtctcccttacaaggtaaactccaccaccggctacatcgactacgacgcttggaagaaaaagccctaggacttcaggccaaaactcataatctgcggtggcagcgcgtaccctcgcgattgggactacaaacgtttcagggaagtcgctgataagtgcggacatt

SEQ ID NO: 48282 - DNA, 258 bp, Glycine max
  Clone ID: 701037078H1
ctttgttttgacggtggcaattcatattttctttttgggatattacaataatatatttgatctgtgactagctagtgagtttacttttgaaattaaccggctaatgattcttgggttggttgatgagtataaattggtcaacacaaaagttgcattcaacatcggcaatttattttcatgacaagcattccgactttgcctattatacaagcaagtaacaataaaagctttttccctctattaggtcactatatgagg

SEQ ID NO: 48283 - DNA, 260 bp, Glycine max
  Clone ID: 701037079H1
gagagatcgacgacagggattcgaaagacgggaagcggagtgagacaatggctggtactggacggcaaaggcgagacggaggtggtggaggccgggaagcacgccatcatgaggcggacgggactccccgcgcgagacctgcgtatattggaccctctcttgtcctacccctccacccttcttggccgtgagagggccatcgttatcaacttggagcacatcaaggccatcatcaccgcccaagagctcctcctcctcaa

SEQ ID NO: 48284 - DNA, 264 bp, Glycine max
  Clone ID: 701037082H1
cgccttgctgagttctgagggaagaacctctcaaggctcactgttcctggaggaccaagtgttgcatgtagcacagcaaaagctgttgagtgggatgctgcttggtctaacaaccttgagccctcaggtagagcagcacttggagtgcatgcatcagcttatggaaaccaggtcaaagctgtagaaccagagaagatcatacccaagatggaagtttctccaccaggagttgccatatagagcttgtatgagccatagcaagga

SEQ ID NO: 48285 - DNA, 258 bp, Glycine max
  Clone ID: 701037083H1
tttcctttgtttctatggcttctgcagaagtagagttccgatgctttgttggtgggcttgcttgggccaccgaccacgatgctctcgagaaagccttctctcaatttggcgaaatcgtcgaatcgaaggtccgttagtcgagggattggatcggatttggattctctcatcccttctgatctgttttgcgttacttgatctatgatacttgtcttgcttgatctataatgattcttttattactcacaccaatcggta

SEQ ID NO: 48286 - DNA, 259 bp, Glycine max
  Clone ID: 701037084H1
ctttctcatcacacttttaagatatttttgttacatagtttatggtctacgagagccctgcctctgtagagtgtagaccaacctccttttctttgctttgagctcgctcgatcttcttccatttcatgtcttgttttattttattttatttatttaagccttttaaatgcccaacattttgttcttgctgtttgagattgatgtattcaattctgagtgaaatcttcttttccgggtgtatgatcaattccactgcgaa

SEQ ID NO: 48287 - DNA, 257 bp, Glycine max
  Clone ID: 701037085H1
cataaccatgtcagacgaggagcaccacttcgagtcaaaggctgatgctggagcatcaaagacatttccccagcaagctggaaccatccgcaaaaacggttacattgtcatcaagaacaggccatgcaaggttgtggaggtttcaacttccaaaactggcaagcatggacacgcaaagtgtcactttgttgcaattgacatcttcactgggaaaacgcttgaggatattgtcccatcttcccataactgtgatgttc

SEQ ID NO: 48288 - DNA, 257 bp, Glycine max
  Clone ID: 701037086H1
ctctgagatgacagttgcaactggtgagctgaagaagcattatctatcgagaacgagtacccgtacagtgtctgtgaacctgcaaggaagcaaggtttctctatatggtgctgatgcaagcttaactggcttggtggacaatggaaaaataccaatgactcttgtctttgaagttggatcgctagggaatattgttgggaggttggtgaggtccaaacatcgaaggcgtgtctcttgctcagtggctattgattccc

SEQ ID NO: 48289 - DNA, 255 bp, Glycine max
  Clone ID: 701037087H1
cgcacaaagcgggttactgtctgttcaagctaccatctctctctctctttcttagtgcctccttgccagaagttaaaatggcccaagaaactttcctattcacatctgaatcagtgaacgaggggcaccctgacaagctctgtgaccagatctccgatgctgtgctcgatgcatgcttggagcaggaccctgacagcaaggttgcctgtgaaacctgcaccaagaccaacatggtgatggttttcggcgagatca

SEQ ID NO: 48290 - DNA, 257 bp, Glycine max
  Clone ID: 701037088H1
gttcctctcgcccagaatccgagatcaaccccgacgaaggcaaggggtttttctcggcttcttcagatttctgaaatggcgcctgtttcagctttagccaagtacaagctcgtcttcctgggtgaccaatccgtgggcaacaccagcatcatcactcgcttcatgtatgataaattcgataacacctatcaggctacaattggtattgattttctatcaaaaactatgtatcttgaagatcgaactgttcgactgca

SEQ ID NO: 48291 - DNA, 87 bp, Glycine max
  Clone ID: 701037059H1
cggctcgaggaaaaagacgaacctgtgaagaaggagcccgagactaagttagcaacaagcaagaaatcccaagctcttcgaagtggc

SEQ ID NO: 48292 - DNA, 246 bp, Glycine max
  Clone ID: 701037089H1
ctactacttctacttctctcaggaaacatgggtatgcaattaagcgaggctcgcttgcaacgccatgagatgaattattattctccgaaaacgttgttcgtttttggggactcgtatgttgataccgggaactatagaataaatcaagctggttcgtcgtggaaaaacccttatggcgaaacttttcccggaaaaccagccggaagattctccgatggaagacttctaaccgactacattgctaag

SEQ ID NO: 48293 - DNA, 276 bp, Glycine max
  Clone ID: 701037029H1
tcggcatcggctcgcacgcatcgcttctcctccatggccaaaccctgatcctcccaattcaaatccaaaccctaatttcctccccgaccaatctcaaaccctcgacttcgactccctcatgcctccgcaacccgaatccccaccgcccaaccatcaccactcccccgacgcctctccaccggaatcctccccgtcgccgccgcctccgtcgatcctctacctctccttcaaccaggaccaggcctgcttcgccgccgccgccgacaacggcttccg

SEQ ID NO: 48294 - DNA, 263 bp, Glycine max
  Clone ID: 701037030H1
cgggtacgaatacggtgggcccatgttctgttacgacgggtactatgcaaggcccgtatatgatagttacggtggaggcagaccctgttatgtgaaccgtggtgatcaatatttcagcgaagagaatccacaaggctgcataattatgtgacaattacgtccacggcgttgcattattgggttctgtaaatgatggtggccattcacaatttgtctcaattatcatcatgtttaatcacgtccaatccaatgtttttgttatt

SEQ ID NO: 48295 - DNA, 265 bp, Glycine max
  Clone ID: 701037031H1
gcaaatctgtaagctctgacggcagcttatagaggtcgttgacggcaaagagagacacaaatgtattctgtttgagtttgaaacattgattcgttgtttcctctgcaaaattaaatcctcattgtgattgttgatgaacaattgcagtgtctctccgatttgaggattccggcgacagccagcgatgaccaccggcggcgacggtgacacctccaaacaagagctcttccaccttatcaaacgcttcggagcttgcgtcactttc

SEQ ID NO: 48296 - DNA, 267 bp, Glycine max
  Clone ID: 701037032H1
ggtttgcagtcactgctctgtttcaccaagtttgggcgtttaaatcagaaccaaatcgtgttctcttccattggcaaacatggcaactcaaatgagcaagaagagaaagtttgttgcggacggagtgttctttgccgaactgaacgaggttctgacacgtgaattggcggcggacggttactccggcgtggaagttagggttacgccgatgcgcaccgagatcatcatcagagccaccagaacccaagccgttctaggtgagaaggg

SEQ ID NO: 48297 - DNA, 271 bp, Glycine max
  Clone ID: 701037034H1
accgtctcatctggatgtctctcaagatctgtctggggagtggagcttgatttgattattgatattaaggaataaaatctcattcaacacactaaacaatagggattttgcaaatgctaaattttggaaggtccagaagtcagtcaagggcagccagagctacaacaatgggaggcatggattatgcagattcaaaaaagacgggcaattttgttgggaaagtatttcttgctgctgcattaacaacactgtgcataatcatgatcaagcg

SEQ ID NO: 48298 - DNA, 270 bp, Glycine max
  Clone ID: 701037035H1
atcagaaccatccctgatgttattggggtggtcattcaggcaaaagtcgcgtttgctcggattgtcaaattcctggaggcacctgaacttcagagtgtaaatatcacacaaaggtgtctcaatcagaataagaggggttcaattttaatcaagtctgctgacttttcatgggaagataatgtatcaaagccaacactgagacacatcaatttggaggttagaccagggcaaaaggtggctatctgtggagaggttggctcaggcaaatca

SEQ ID NO: 48299 - DNA, 266 bp, Glycine max
  Clone ID: 701037036H1
gtgctgtgcaggtcaaggcccttttacttgttcgtccggttgttcccatcttctctctcgtaccaatcaaatcacacttttgtgttgtgttgggaaaccctaaaccccgttttcggtgagatcgagatcgatcgaacatggatgaggagtacgatgtgatcgtgttgggcacgggtctcaaggagtgcattctcagcggtcttctctccgtcgatggcctcaaggttctgcatatggataggaacgactattacggaggagaatcc

SEQ ID NO: 48300 - DNA, 264 bp, Glycine max
  Clone ID: 701037037H1
catcaacatgtttctgtgcaagcaccaccaccaagacaggttttacagtattcacatatgactcagacaagtcctttgggtcacattgggcccccaagaaaccctgtacagaatttgttaactccaacaaatgcttcactttcatttcctgttactttaagccaaccaacgccaataggacaacatcagacatctgtgtcttcaatgcatctacctatgtctggtatatcgtcatcaatacctaaccagtcattgacccatcta

SEQ ID NO: 48301 - DNA, 257 bp, Glycine max
  Clone ID: 701037038H1
cagcttcagagtgatgctttgcgtgaacgccatttcaggaatcatggccgattccaaggagaagaatcgcaaatttgtggagaccatcgaactccaaatcgggttgaaaaactacgatccacagaaggacaagcgtttcagtggctctgtcaagctgccccacatccctcgccccaagatgaaaatttgcatgcttggtgatgctcagcatgttgaagcggcggagaagataggactggactggatggctgtggaag

SEQ ID NO: 48302 - DNA, 260 bp, Glycine max
  Clone ID: 701037039H1
tataactcatttgaggctctgtgagaattgagaaatggctaaagatgttgcggttcaagagcaaggcggagagtactctgccaaagactaccatgaccctcctccagcacctttgttcgacccagaggagctcacacagtggtccttctatagagccctcatcgctgagttcatagcaacccttctcttcctttatgtcactgtgctcaccattattggctacaaaaggcagactgatacaacggtaggtggcaccgact

SEQ ID NO: 48303 - DNA, 261 bp, Glycine max
  Clone ID: 701037041H1
gaagtttgatgtgtatgatttggagctaagctctatgttttctaactcggaactcatgcgagtcatgagggaaacaaccaaccgctccatcatcgtcatcgaagacatagactgcaacaaagaggtgcatgctcgaccaacaacgaaacctttttcagattcagattcagacttcgaccgcaagcgtgttaaggttaagccttacaggtttactctgtcgggtctgcttaacaacatggatggtttgtggtcaagtggtgg

SEQ ID NO: 48304 - DNA, 254 bp, Glycine max
  Clone ID: 701037042H1
cacttggaggttataccttaacagtggatgacgccaaacctagagataatcagggttctggtggtagacgtgccggtggaaggagtggtggcggtcgatttggtggtaggagtggtggtggtggtggtggtcgatttggtggaagaggtggtggcggtcgatttggtggaagtggtggtggtggtcgatttggtggaagtggtggtggtggtcgatttggtggaagacgtggcggtggaaggggtcgtggaaat

SEQ ID NO: 48305 - DNA, 261 bp, Glycine max
  Clone ID: 701037043H1
ctgatgtagctcaagaaaacattgccgagtcccctccttcttccactgtgttcaacatcgatggcttagtcccatcccccaccccttcatcaaagagaaggcgggcaatacagaaaagggtggtgcaaatcccaatgaaggagacagacccgtgtaggctaaaaggagagagcaacaccccaccctcggattcatgggcttggagaaagtatggacagaaacccatcaagggttccccttatcccagagggtactacaggt

SEQ ID NO: 48306 - DNA, 129 bp, Glycine max
  Clone ID: 701037045H1
gagatcccttctcacttctatagtgctattctcttctctggctccacctcttcacctcttctctcccctgtcttcttcttaattagcctctctcattgcgtgcaccagcccaaaaaaaatatagatata

SEQ ID NO: 48307 - DNA, 252 bp, Glycine max
  Clone ID: 701037046H1
ctgacagtcccagccagagcagcaccgtggcgtcctccaccccggagcgtgaattcacgcgccgcgccgcccccgccgcaatggatcgctttccgttcctacccatccagcagcaaatcctcgtgacccaccccgtcgcaccatgcgcccggtttactttctcgaccgggcccacttcatgacccagcccttcccactccgattcgaaccgggtccggtccagagcgactccgactcgtcctccgtcgtcgt

SEQ ID NO: 48308 - DNA, 262 bp, Glycine max
  Clone ID: 701037047H1
cttcaacaacccttgttttgttctgtgcaagtcatcttgaaaggcacaacaatggtgaagtctataaactttctcctgcttctgtctctactagcctttgttccctcctgtcactgcaaaaagaacataggaggttacctctaccctcaattttacgacggttcatgccccagagctcaagagattgtccaatccatcgttgccaaggctgtggcaaaagaaccccgcatggctgcttcgttgctcagactacatttccatg

SEQ ID NO: 48309 - DNA, 266 bp, Glycine max
  Clone ID: 701037048H1
caacgttaacccaatggggaacaacaacacactctcatcacagcccttaaacatgttctcagctgattactatgtacaccaaaacaggatcaaaagctccatcatgccaagtgttgcaggctcaggttttgttagcgacaacaataaccatgatgaagctatcctaagagcatttgcagccaagaacaacgagcacatacagtgcaagatggagcaattttcttctaaccactcacaagacacgggcttgagcaacgacagaaaca

SEQ ID NO: 48310 - DNA, 136 bp, Glycine max
  Clone ID: 701037049H1
ctcgagccgcaactaagaaaaacatatcacacaatatggcattcaagggctatttccttctcggcctcgttactcttgttcttgttaaatcttccaaagttacatgcgaagaagaatcagttaatacagtttcacc

SEQ ID NO: 48311 - DNA, 265 bp, Glycine max
  Clone ID: 701037051H1
gaaactcaaaaccaaaataaaattattatggatcatattcataggttacgttgttttgggacaatacccaaaattccttttctattgctactttccctgcttctcttcagtttcgttaacgcatccttcgacctcgctactatacccttcaacgacggctattctccgctcttcggagctagcaacgttgttcgctccgaggatggatacggcgtacaactccgcctcgatcgctacacaggttcgggtttcatttcctccagta

SEQ ID NO: 48312 - DNA, 259 bp, Glycine max
  Clone ID: 701037052H1
ccaaaaaagacattgttgcttttcattttggcatcacagagtatcagagagaaagagagagagagcggttttgcagaaaaaatccaagtaaatttaaggagccaccactgttccaatcagcccctttcattttgcagtgcccgtttattttttcgtgtttgcattcaccgttccacagaaggcaaaaagcctgctttgttccatctctttctgtggtgtgtctcaagataaaaagctcactcactcacagcagcaacaa

SEQ ID NO: 48313 - DNA, 261 bp, Glycine max
  Clone ID: 701037053H1
cgtcgaccaaactcacgtcgtagaagtccaacccgtcggcaccgttgagagtgaattccgccaatgtcgccggacgtttggccccgccaacgcactgtactttgccggacccgcagtcggcggtggcgcaagagaattttccgtcagagtcttggccgcagagggtccgtgcccatatccgacccgaccaagacttcgggatttttacaatccttgatttgccgctctcgagggtgaatccagtggtgggaagcggcggtg

SEQ ID NO: 48314 - DNA, 125 bp, Glycine max
  Clone ID: 701037054H1
cgcaactaaaactgcgtgtgaactttagtactataatttacaatattgggtgaattgttattcctgaaatagtacggatcagtcaaactggtttctgaaataaataaaatagcaaattagtttct

SEQ ID NO: 48315 - DNA, 257 bp, Glycine max
  Clone ID: 701037055H1
atttgtattattgagttcaaggctggctagggaaggcaatctcttccgattagagatagaaggttcatcatctcatctcaaaaaggcttttgtgattgataatcagttctcgatttgatttgatcggaacagaacagaggcatgggtcaagcttttcggaagctcttcgacaccttcttcggcaataccgagatgcgggttgtgatgcttggtctagatgctgctggcaaaacaactatactgtacaagctccacat

SEQ ID NO: 48316 - DNA, 258 bp, Glycine max
  Clone ID: 701037057H1
cgaaaatggcgggtggtggaaaggtttcgttcaaagtcacactcacctccgatccaaaattacccttcaaagtgtttagcgttccagacgctgcgccttttactgccgttctcaaattcgccgccgaagaattcaaagtcccgccccagaccagcgctatcatcaccaatgatggtgttggcataaatccccagcagagcgcaggcaatgtcttccttaaacatggttcagaattgcgcctgattccgcgcgataggg

SEQ ID NO: 48317 - DNA, 251 bp, Glycine max
  Clone ID: 701037058H1
cttcttcttctttctattcctcactcaagggttagggatgcgtcggaacagccctgcatactacagtcctccgcggcgaggatacggcggtggtggccgaggcggaggaggcggaggaggaggcggagggtccggcagagggggttcggtggaggcaggcgcagggacagcaatgggagcctcttggttcgtaacattcccctcgattgcagacccgaggagcttcgcgtccctttcgagcgatttggacc

SEQ ID NO: 48318 - DNA, 261 bp, Glycine max
  Clone ID: 701037028H1
caaaatgattccaaccctactccgcctccggaaccccttgtagcggcggaacccattactgaggatttggtccaagacaaagaagaagaggatgatagtagtaagattgttattccagtcccagagagcgagtccttgtcattgaaggaggatagcaatagggtttctgattccgagaaaaatgccattgatgagctgaagaagctcctgaaagaggaattagaggacgaggaggtttccatctggggcgtccctctcttt

SEQ ID NO: 48319 - DNA, 279 bp, Glycine max
  Clone ID: 701036992H1
atagaatactcctctctcttactgagaggctaaacctaaaacccttacctttccttcccgctctcataatgagggacagaaactgagagtgaaatgcagaaactgctacgcccttcttcttctccggtcgccatcctctctatctccgtcaccgtggctactccctttctctcgttgccccccaaagtttcaaacttggtaccaatgtcagcagcgttcacttcttcttccctcaatccccaactttcttattctcgctatttggctctctctaccaac

SEQ ID NO: 48320 - DNA, 273 bp, Glycine max
  Clone ID: 701036993H1
ggtctcttgtcaccatggattcagaagtacttaacttattagcccttatcttgccctttttactcttcgttattgtggcactgaaaataggaagaagacatctcaagaaatctgagtcaactccaaaaatacccccaggaccatggaagctacctatcatagggaatatactccatcttgtctaatctacaccacaccgaaaattaagagacttggccaaaatatatggacccttgatgcatctccaacttggggagctcttcataatcgttg

SEQ ID NO: 48321 - DNA, 280 bp, Glycine max
  Clone ID: 701036994H1
ctcttcctctctactaatctcagctatggccgacgaagctgtggttgttccagatcccacccagatcgatgtcaagctctttaaccgctggagcttcgacgatattgagattactgacatttctctggctgattatatcggagtggcgacatccaagcacgccacgtatgtgcctcacaccgccggcaggtactcggtgaagcggttcaggaaggcgcaatgccccattgttgagaggctgaccaactctctcatgatgcacggtagaaacaatggcaag

SEQ ID NO: 48322 - DNA, 114 bp, Glycine max
  Clone ID: 701036995H1
gtacaaaacgagtgtaaaattatttaagtatttgatttcttgcttacgaaaaaaggattttataattgtatctggtgaagtgaaaaattaatgtgcatgagttgattattttaa

SEQ ID NO: 48323 - DNA, 286 bp, Glycine max
  Clone ID: 701036996H1
cccaaacaaaccatggacgtgggtcagatgcagagacagtggatcgagtacaccaaatccctcttcctcgagggcttcctggatggtcagtttctgcaacttcagcagcttcaggatgagaacaaccctgactttgtggtcgaagttgtctctctcttctttgaagattctgaaaggcttctcaaagatctcacctttgccctagatcagaatggcgttgacttcaaaaaagttgatgctcatgtgcaccagttaaagggtagcagttcaagcataggtgcacaaa

SEQ ID NO: 48324 - DNA, 136 bp, Glycine max
  Clone ID: 701037002H1
ctcatgtgccgcacgcttgaagcgtgcaactcttatgtcggcacgtgcgcgtacatgagtcccgaccggttcgacccggaagcatatggcgggaactataacggttttgctgcggatatttggagtttgggtttaa

SEQ ID NO: 48325 - DNA, 164 bp, Glycine max
  Clone ID: 701037004H1
cgcacgcacgcgtagaattccgctcgaggccccactcaactaccacacctctcctcgttcacgctacccctttctgctcttcttctacctttcaagttttaaaagtataaagatggcagagacattcctatttacctcagagtcggtgaacgagggacaccctg

SEQ ID NO: 48326 - DNA, 267 bp, Glycine max
  Clone ID: 701037007H1
ccgcgtaccgccagcctctctacgacaatctcctttctctctaactcataactcagatgagttccctctctaataactctagtagtagccacggcaattccttcctccagatgccccccatcaagtttaccaagctcttcatcaatggagatttcgttgattccttatctggaaggacatttgagactatagaccccagaacagaagaggtaattgcacagagttagtgcgggagacaaagaagatattgatattgctgttaaagca

SEQ ID NO: 48327 - DNA, 265 bp, Glycine max
  Clone ID: 701037008H1
ccctccttagccgttaagttagatgacgacaagagaatccattcgctacgttcctctctcgattctcttgtctccaccaaacaaatccctccctccttagccgttaagttagatgaagatttgcagagagcgagatgcatcatcgttgacggtgacgcctcttcgctcctccctggccatgcacaaggacggatgttcaactcaaggtcaaagaggaatacaacagttacagggatagaactgccctgctattcctgctttttcc

SEQ ID NO: 48328 - DNA, 263 bp, Glycine max
  Clone ID: 701037009H1
ggaggttgaacaagaggaaggagcaactgacattttttggcggctttagccgccagtacctttatcttattaacgacattacctttgaatgcacggtagagaccaatttaaattattttaaatagataaatgattatattttactcaaaaaggtgatcaaattgaagtttttaaaaagaagataaagaactaaaacaataatttgatcttaatttaattatattttattacttatttattttgataatttttagcggttagaa

SEQ ID NO: 48329 - DNA, 262 bp, Glycine max
  Clone ID: 701037010H1
ctccgcttctgtcctccagctctctgaatgctatgtcaggcaggaagctctactttaaatgtgaatgtttacaaaaggggtgagaagtggatattttatgaattctacaaaatttagatgctatttttcatctcttgttttttggagttattgatgtactttaaattcgatcacacttttggctaaaaaataaagaagaaaagatgataacacacttccttgtgttgtgtattctgtgcccatcagtggagcttttaaattt

SEQ ID NO: 48330 - DNA, 264 bp, Glycine max
  Clone ID: 701037011H1
cacggagcttctcttcgccaggcatccgccacgtgtcaccttcaaccaccgcgagtacgaacaactcacagactccaacgatgccgtttcaacagacttcgagcagcgttccttcttcttcggccccaccgaaaccgcctccatccgcgccctcctcccccgtgacctcgaccaacgcgccacaacgttcgaggtgctgacgtcatacgtctggcgctgccgcacgacagcgcttcacatccctccaaatgaagatgtgagaat

SEQ ID NO: 48331 - DNA, 158 bp, Glycine max
  Clone ID: 701037012H1
gttcgtggtcgtgtgtgtatccatcaaatatatagttccaagcctcaaaattctagctatatagtacgttaagcgtccattgatgtagctttgattaatttagtgtatgtttgatacaagatatttaatttagagaattaatagttttatttttatcg

SEQ ID NO: 48332 - DNA, 261 bp, Glycine max
  Clone ID: 701037013H1
cacattggttggttcctccttcctccaaagaaaaaactagagtgaatctcaaaacatgtcaattgtcttctctgctgctgcaaccctttcccctcggtctcggttattattccctccacttagtttttctcacacttaccctacgaaatttcatcgaaatcggtggcatccaagtctctccaaatcgaggacgcagacccttattacaaactctttgctttctgataagtttccaacggtgggttcgctgtcaacgggacc

SEQ ID NO: 48333 - DNA, 262 bp, Glycine max
  Clone ID: 701037014H1
caatgcataggaattggttgttagcactgagaacatcactttgaattggtactctgggaatgaccgatcgaagcttgtttccaattgtttgttccgtatgggaggggctgccattctgctttcaaacaaaggctctgataggcgaagatcaaaataccagctggttgacaccgttcgcactaataagggttctgatgacaagtgctttggctgcgttgtccaagaggaagattccaatggcaagattggtgtcactttgtca

SEQ ID NO: 48334 - DNA, 266 bp, Glycine max
  Clone ID: 701037015H1
tgttattctttcgatcagctatgaagtaaagagacgggcaaggagagatagatagggaagaaaaatgagtgtatcattgactgtgatgaccttcaatctccatgatgatgagccacaagacagtcctaattcgtgggcgaagagcgggatatgtgcataagcgttattaccagttactcacccatcatcctctgtacccaacaaggcgtgaaagcacaattggattttctccagcagggtttgccaggttatgatcaatttgggat

SEQ ID NO: 48335 - DNA, 266 bp, Glycine max
  Clone ID: 701037016H1
gtgctgtggtcgaatgggagggagacggaggagccttcggcgcgtaataagcagtgtcccgggaagaatctggtggtgctgctgtgcaggttgtttctggtggaactctttttgcgttatgatacgtttgagtttgagtatacgcggctgggtttggtcctactattaccattaagtccctcactaaggcctctaccatctgagtttggggtttattatcttccttgtggcagcgtggttttagcttaatttttaacaaaatgtat

SEQ ID NO: 48336 - DNA, 135 bp, Glycine max
  Clone ID: 701037018H1
ggaattccgctcgcggcaaagctcgtcgcgttcgtctctctctctctgagctcgatttattgggctcttcgaattcggttcccgatttccgacgagttctatcattcacttcaatcttcggaaatgcctctcaga

SEQ ID NO: 48337 - DNA, 146 bp, Glycine max
  Clone ID: 701037019H1
gttccgttacgctacgttcactctgtctgttgggcttttagggttcgggttcgggttcgggttttggtttgtggatctattgttgtcgctgcgatggatcgcaagaggggaaggcatgaagctgccttcaatttcaatggcggcgc

SEQ ID NO: 48338 - DNA, 264 bp, Glycine max
  Clone ID: 701037020H1
cttttgctttaccaaattccaatttccaattcaaaaccctaacaccgttcgaagcaccaaatcgtgatggcaccaaaggcagagaagaagccagcagagaagaagcccgcggaggagaagaaatcgacggtgggagacaaggctccggcggagaagaagccaaaggccggaaagaagcttccgaaggagggaggcgccggcggagaagggaagaagaagaagagaaacaagaagagcgtggagacatacaagatctacatcttc

SEQ ID NO: 48339 - DNA, 265 bp, Glycine max
  Clone ID: 701037021H1
cacagataaggaccgtatcgtacgcaactggatctgctcttctggcgcttgctgcaacctcgtccgaaacgttcgttttggcaaaatctgaatcattggaattttgaagcgactcgattcgatgcgaggccacgattggatcaaacgctgctccccgacgagttactcattgagatcttccgccgcctggactctaagtccaaccgcgacgccagctccctcgtctgcacgcggtggctccgcctcgagcgcctcacacgcgccg

SEQ ID NO: 48340 - DNA, 263 bp, Glycine max
  Clone ID: 701037022H1
gttgagatccactgctgcagaatccaatttgtgaccctaaatccaagttactatgactgctcagacccaagaggagcttcttgcgcaacacctcgaacagcaaaagatccatgatggtgaacctgttgtcgaggatgatgatgatgaggaagaggatgatgatgatgatgatgatgaggatgatgaccatgccgaaggactagaaggtgatgcatctggtaggtcgaagcagaccagaagtgaaaagaagagtcgcaaggcaa

SEQ ID NO: 48341 - DNA, 264 bp, Glycine max
  Clone ID: 701037024H1
gcttagttgagactaaactgaaggagggagatggacacaatgttctgaaacgctcttcttcctacaatgatgagaggacatttaaagaccagaaaccacaagaagacaaagaggaatcatcctcaggacattcaaaatgcattcctcgatcaattaaggcttcattgaccaagcatccccgaagtgaatccatgagatctcctgtctctgacgtaccacagaactcatcagatagaattgatggctcaggcatatcccctgtaa

SEQ ID NO: 48342 - DNA, 261 bp, Glycine max
  Clone ID: 701037025H1
acgcaattcacaaatcacaaatcacaaatcacaaatcacaaaggtcttttcatttctgctgattatcctcttcagccgccatggaatcggaggctgtcttgaacctcttcgattcttgctggtttgaggttaacattttgaagacaaattcaagtcctcacatatcaattacaagttataacgaaagtttagattatgagataaacgacgaagaagacgacgaagaaccaaagctacccttgatccgaaccagccacacca

SEQ ID NO: 48343 - DNA, 261 bp, Glycine max
  Clone ID: 701037026H1
caactactgacattcccaaaggcaaaaaacaaaaatacaagatgaagagcaagttcctttttgttttcctattcttgggaattcttaactgtgaagcacaatatttcaatgccaacccatacgactatttacaactagccttaaggtggcctaattcctattgcttgacacatgaaggtggttgcagggcaatagtaccacaatatttcactattagctaccttcatcccatgagaagcggaggccctgatctgcgacatt

SEQ ID NO: 48344 - DNA, 283 bp, Glycine max
  Clone ID: 701036991H1
ctaaaatttcccaattcattgcgcaccttgccctaatcacgcgtcctattcttccggcgaatcgccaccgtcgccggcagtaaaaccagccgctccactccctccccggcggtggtactagcaactctccctcgccgggaactaaccaagactaaggaagtagagtgagaacccgcgaagactcttagcttcactttcttcagctcacagtttctatcacttgccgaatccaatccaacagagtcctggaaacagtggcatcagctttcgccccatgggtgtt

SEQ ID NO: 48345 - DNA, 290 bp, Glycine max
  Clone ID: 701036964H1
attggatgcgagagttctgagaagaaaagagaagatcggtgagtgaggaagcaaatagcaatagcaccgccaccgtcaccactgccactgccactagcaacagcagaatgggaaccttgggcagagttttctacgccgtcggattttggatccgcgagaccggccaagccatcgatcgcctcggctctcgtctccaaggcaactacctctttcaagaacagctgtctaggcatcgacctctgatgaatctgttcgacaaagctccctcggttcacagggatgcattgtgg

SEQ ID NO: 48346 - DNA, 147 bp, Glycine max
  Clone ID: 701036965H1
gaattgtgcctatataaacagtaccgaaacctcaaagaaagcacacatcattagaagtgaatttacaaagaaattcaaaagcaaagcaagaatcatgaattccaatatttgcaattggaaacaaaatcaggttcttcccacagagga

SEQ ID NO: 48347 - DNA, 292 bp, Glycine max
  Clone ID: 701036966H1
cctcgagccgaatcggctcgaggaaagaagagagagaagctgcgcaacttttcacactagtgcacattgctgaaactggcatcgctcgccatttgcgcaaagatcccaacaacaacaccattcgaaagttgaaactgaaaaacaccaatccctcctcgtacgaggtttccttgttccgtcatcaattctcgtgtttaaggacacagtttgcttgatacgttttcaagttttcatctccatgttttgattttgaagaataaggagtatgcaattgactactacagatgtggtt

SEQ ID NO: 48348 - DNA, 290 bp, Glycine max
  Clone ID: 701036967H1
atacaaaccacccgtttataagccaccagtttacaagccaccagtgtacaagccaccagttgagaagccaccagtgtacaagcctccagtgtacaagccaccagtatacaaaccaccagtttataagcctccagttgagaaacctcctatttacaagccaccagtttacaagcctcctatagagaagccaccagtgtacaagccaccagtgtacaaaccaccagtgtacaaaccaccggtgtacaagccccctgttaagaaacctcctatttacaaaccaccttacccaa

SEQ ID NO: 48349 - DNA, 284 bp, Glycine max
  Clone ID: 701036968H1
cttcttcgtagcatttccccacacgttttcctcgccgaacggcgatcagagctcgccgccgatcgatttggcgtcgtagcagtttcatagtgacgttggactctgaaaacggcgcgttttgagatttggcttttcgcgtgcgttgtcgaagagagagaaaccaaaaaatgaatgggattggtaacgacggaggaggaggattgagcaacgtggagatggagtacataagaagacaccacaggcacgatcctggtgagaatcagtgtggctctgcgctcgttaag

SEQ ID NO: 48350 - DNA, 284 bp, Glycine max
  Clone ID: 701036969H1
ttcaggcattagtaagaactaaggggctcttctcattttacgaggatgggcatcaagagtgctgtagagtaagaaaggtgaggcccttgaggagagcccttaagggtctcaaagcatggattactggacagagaaaagaccagtctcctggtactaggtctgaaatccctattgtccaggttgatcccgtttttgagggactggatggtggaattggcagcctggtgaagtggaacccggttgcaaatgttaatggtctagacatatggaacttccttaggacc

SEQ ID NO: 48351 - DNA, 285 bp, Glycine max
  Clone ID: 701036970H1
gtgatttggagtttggagcgactgaactaatcattaatttgcactcgctgtttcagcttcatcacccttcttttgcatcatttatatctcttgagaaatggcacaagaaacctttctattcacatctgaatctgtaaacgagggtcaccccgacaagctgtgcgaccagatctctgatgcagtacttgatgcgtgccttgaacaggaccctgacagcaaggttgcctgtgagacatgcactaagaccaacatggtcatggtcttcggagagatcacaaccaaggc

SEQ ID NO: 48352 - DNA, 286 bp, Glycine max
  Clone ID: 701036971H1
gcaaatcatatcagccattgggaatcgagataatgttaatcctcgtgtaaatgcctcgagctcgttgaacaagtctcaactaagaacagatggaggccatctacttggccacaatatgacttctggcagtacttcaatactaggaggactcccaatacatggtgggatgagtactcttttgaggtcaaatctgattaccagttctggttcaaaatcttcccaagcatccacagctgatttttctggagtaggagttggaattggacctcaaaattgtgattcttca

SEQ ID NO: 48353 - DNA, 285 bp, Glycine max
  Clone ID: 701036972H1
cttttctctctctagaattctcagatttgcggggcgagatgatgcagcagccaggacccggcatggcacctcccaccatgggccagcagccgcagcaacagtaccagcagcagcctccgccgcagcagcaacaaccctacgtcatgatgccgccgcagcatcaggcgccgcagcctatgtgggccccatccgcccagcctccgctgccgcagcagcctgctagcgccgacgaggtccgaaccctctggatcggggatctgcagtactggatggacgagaactatc

SEQ ID NO: 48354 - DNA, 282 bp, Glycine max
  Clone ID: 701036973H1
cacatggcgtatataatcatgtacaaggctcgtgttgtatctgtgtaattgctaggaagagccgatttggtgttttacttcagagaatcaaggattgtgaatgagaaatggtttatttgttttctactcctgaggtttgatgctcattagtcggtatttatttcgtttaggtattatattttttttaaaggatgcataaggatttgaaatgaagcatggtacccctgaatctccttccttccatcgactgggtccaagaggcacttgaatatcaagttacat

SEQ ID NO: 48355 - DNA, 282 bp, Glycine max
  Clone ID: 701036974H1
gagattttgctgctctttgaagaagggtgtttgcttgattttggtgatgtcgctgctctcagatctcatcaaccttaacctctcagacactactgagaaggtgatcgcagagtacatatggatcggtggatcaggaatggacctgaggagcaaagcaaggactctcccaggaccagttagcgacccttcaaagcttcccaagtggaactatgatggttccagcacaggccaagctcctggagaagacagtgaagtgattatatacccacaagccattttcag

SEQ ID NO: 48356 - DNA, 279 bp, Glycine max
  Clone ID: 701036976H1
gtgactcgttcttcttcgtcgttatcttcttcttttgttgtttgtgtgtttgttttttctctcacctgaaaatgtcttgctgcggtggtaactgtggttgcggaagcgcctgcaagtgcggcaacggctgcggaggctgcaagatgtacccagacttgagctacaccgagtcaaccaccaccgagaccttggtcatgggagtggcaccagttaaggctcaattcgagagtgctgaaatgggtgttcccgctgagaacgatggctgcaaatgtggagcta

SEQ ID NO: 48357 - DNA, 285 bp, Glycine max
  Clone ID: 701036978H1
aagaagttaaaaataaacgtatctgcattgcgttgctagttccgagttcttgcactcgttagaccaattcctcgtcttgacaacttttccacgcacaccttcatctcccaatcctccaccacaaacatgaagactcgtacctcgaccaaaatctctgcaacgtggattccaattttctctgtcttttccttcattattggtatgctcgtcacaagcaggatgtgggacccaccggaatcaaacgggttgcttactgcgcacatcagcgggaccaacaacagctac

SEQ ID NO: 48358 - DNA, 143 bp, Glycine max
  Clone ID: 701036979H1
cggcggtctttcgtaagtgagagcgtggattctgaagaaaacgtgagaagtagtcttagagggagtagcagcgagagactacccgtaggtgtggttcttgcacgggcaagactccttcagaggttgagaggggaacctctatc

SEQ ID NO: 48359 - DNA, 287 bp, Glycine max
  Clone ID: 701036980H1
ccaacttccaaaccctaaaagtctccgcttttaattttctgttgttttctctctcaaatcggtgctcccttcggcggcgcgtgacggtttccagcggcgcgtgagggtgttattcgcgcgttattccaagttccccgctgacctatgctctgtccgacccacattggagagttcacgccggagagaaggcggaatctcactggacggccgtgatttggcacctccatggcttccgccgtccttgctaatcggaacgaacctaattggcaacggcatagaggcggtgg

SEQ ID NO: 48360 - DNA, 284 bp, Glycine max
  Clone ID: 701036982H1
aaatgcttgggcagcaaaccttggtgatgatggcttatggggaaacaatgcaccagcaatgaatagggtaaatgaatttctggcaggtgctggaacagacgccccagaagttgatgaagagaatatgatctctaggccttcagttagctatgatgatatgtgggcaaaaacacttctagaatcttctgagctagaggaagatgatgcaaagtcattgggatcatcatctccagattcaacaggatcagttgcaacttcgatatcatcccactttggaggaatga

SEQ ID NO: 48361 - DNA, 287 bp, Glycine max
  Clone ID: 701036983H1
cacacaaacccgtccctcacactctccaaaccctagcggcactacacactagttctatcgctatctccccaagatgtcgagcgccgatcccgagcacagagaagaggaggaggcacccgccgttggcgacgacgaggacaccggagctcacgtcgctccaatcgtcaagctcgaggaggttgctgtcaccaccggcgaggaggacgaagatgcaatcctggatctcaaatcgaagctttaccggttcgacaaggacgggaaccagtggaaggagcgtggcgccggca

SEQ ID NO: 48362 - DNA, 284 bp, Glycine max
  Clone ID: 701036984H1
gcccagaacacctggtaccgagtcccacaggtagggagggtcctgtttttataactatggatagaaccttcttaaggctaatcaatgatataattttggaaactgacaagacaattgaagttagaggctgttccctttgacttgtgccattccttctctcaataaacttctattgatgccccgctccacgttccattcttcagtatcctttgtagtttgaaccttcctcacactcccacttcagaaaccaatcaaagagagagagagagagagatgggtagagc

SEQ ID NO: 48363 - DNA, 282 bp, Glycine max
  Clone ID: 701036985H1
gttgactcagcgatggcggaagaggtgactcgggtgatggtggcagtgaacgagtcgagcatgaagggataccctcatccttcgatcagcagcaaaggggctttcgaatggaccatcaacaagatcgttcgcaacaacgtctctgccttcaaccttctttttcttcacgttcaagtccccgatgaagatggttttaatgacatggatagtatctacgcatcgcctgacgattttaagaacatgaatcagagagatagaattagaggggttcatctgatggaa

SEQ ID NO: 48364 - DNA, 138 bp, Glycine max
  Clone ID: 701036986H1
ggaaattaatgaaaccgtacgtgcgtgcgcgagagaggttgtcgatttttgtttccattactgcatgggaagccaacaaggagtagaaatttctatttttgtcttgaattagattatgcttacaagatttgtatagtc

SEQ ID NO: 48365 - DNA, 281 bp, Glycine max
  Clone ID: 701036987H1
cacgaatgatatagcgttgccattctcatcctcttctttctctctctaccattgccatggatccctacaagcaccggccatccagcgccttcaattctcccttctggactacaaattctggtgctcctatttggaacaacaactcctctttaaccgttggagctagaggtccaattctgctggaggattatcatcttgtggagaagcttgcaaattttgatagggaacgtatcccagaacgtgttgtccatgccaggggcgctagtgcaaagggtttcttt

SEQ ID NO: 48366 - DNA, 279 bp, Glycine max
  Clone ID: 701036989H1
tgctctgtgattccagaccttaatttttccctcattcgcttcaaatttcaggaaatcaattatggctcaaccctcaacaagaataggccttgcacctctggctgttatgggccaaaatctagcactcaatattgctgagaaaggctttcccatttctgtttataaccgaaccacttccaaggttgatgagactgtagaacgagcaaaacaagaaggaaatcttccagtttatggctaccatgaccccgaagcttttgttcattccattcaaacgcctag

SEQ ID NO: 48367 - DNA, 279 bp, Glycine max
  Clone ID: 701036990H1
ctcagtgaaagagaatccgaggcgaagagaagagaaaaattaagatggaggggaaggagcaggatgtgtcgctgggagcgaacaagttcccggagagacagccgattgggacggcggcgcagagccaagacgacggcaaggactaccaggagccggcgccggcgccactggttgacccgacggagtttacgtcatggtccttttacagagcagggatagcagagtttgtggccacttttctgtttctatacatcactgtcttaaccgtcatgggagtcg

SEQ ID NO: 48368 - DNA, 278 bp, Glycine max
  Clone ID: 701036963H1
caccagtgtacaagccaccagtatacaaaccacccgtttataagccaccagtttacaagccaccagtgtacaagccaccagttgagaagccaccagttgaggaaggaaacggcggtgatacgcgaaccgcctcacgcgccgtccaagacctgccggcgtcgctggacgtcggtgcgtcggtggcgcaggagtcgcttgagtccgtcggccaagccatcgatgacatggcagcaccgtttggaatcgacagcgagatactctcacggtaggatctctct

SEQ ID NO: 48369 - DNA, 287 bp, Glycine max
  Clone ID: 701036937H1
agaggtgaaaggaagacggtaatctaactttcatgcttacgtcaccaccactcactctttttctaccctaaaccattgaatcgatctaaatctctcccaaatcgcaaaccccttttgctcaattcagtcaattctctccctaagttccgctgtcggcgtctaggttttggagcatacgacaaaaacttgggtgagggagaacgtttccagcttgggacggtgggcgcgttgactctttctgtggtctcatctgtgtccattgtgatttgcaataaggcgctgatgag

SEQ ID NO: 48370 - DNA, 289 bp, Glycine max
  Clone ID: 701036938H1
gtgatttccattgccgccaccgattacccaccaactgatatacataacctcttcacctttccctccttccctaatttatcactaaaaaaacaaacaaatataaaaaaagtccactaagttggggcacgtcacccatctcgcccttcccctcgctcatctcaaatccatgcttcggaattagggtttccattcggatttcgtaagtctggtgcccaatttcgtgactccgagcgacgtaaaacgggaagggaaagggatgaggatttggggatcggagatcgtgttcgcc

SEQ ID NO: 48371 - DNA, 289 bp, Glycine max
  Clone ID: 701036939H1
ggcggagagagacaaagagagaggtagagaaaagcgaagagtctctctcttcctatctctctctttcaatgtcagggcacaaatcttccacctctacttcttcttcttcttccttctaacctatatcagaaggaaacgcgaaaaaagaaaaaaaaaaaagaggcagaaggttctagaagccgccaatttttatttcttttaatttgtctgagtcagagacgttcgtgattgtaaccatggattcttcgtgtgtcccaaacggcgacgtttctgggttcaaagataagga

SEQ ID NO: 48372 - DNA, 287 bp, Glycine max
  Clone ID: 701036940H1
tggagatgaaaagtattgagatggagatcaagagaagaaatgccgatccaaaacttagaaacagatgtggcgttaacgttttaccatatgaactgcttataccaagttctgaacgtggggcaacaggacgaggagtgccaaatagtgttacagcctagtccaatatgtgtacaaaccagcaactgaatcaatgttctattattcttcaccttagctggactaaaatggatttaatatttgatctcctaaaaacaagaaagaaaataaaatgcaaaagggaataatgc

SEQ ID NO: 48373 - DNA, 289 bp, Glycine max
  Clone ID: 701036941H1
caattccaatttcagtcacaaacaagtatacaattctagaacacaagcttctctcaaatttcaaagccaaaaaatgtcaaccaccattgatgtcccagaatcaagcaatgttgctaaagaaaaagtagttttagctgcaccctcaaggtctggagggtggaagaaaggggtagcaataatggactttattctaaggttaggtgccatagcagctgctcttggtgctgctgccacaatgggaaccagtgatcaaacactccctttctttactcagttctttcagtttgaa

SEQ ID NO: 48374 - DNA, 283 bp, Glycine max
  Clone ID: 701036942H1
gtgacaccaatctctatgaggtgatggtagaaggtgagaatggagggagagttcaagctgcagctatttgccacatggacacctctaagtgggaccgagaccacgtgtcctttcgtgtgctcaaagttgagccgggaacctcacctgtgtgtcatttcttccctcctgataatctagtctgggtgcctttgcctctggctccataactatagtctatagtttcatgttcttcttcatcaaagtttgttatatatatatatatgtgccaggtataacataagtt

SEQ ID NO: 48375 - DNA, 284 bp, Glycine max
  Clone ID: 701036943H1
cggtttttgagtgcggcggtccaaacactcttctctgcagcttttgcctacaactcccttcaccatggctgaacaaaccgagaaagcttttctgaagcaaccaaaagtgtttctcagcacaaagaagactgggaagggaaagagacctggaaaaggtgggaaccgcttttggaagtccattgggctttcatttaagactcccagggaagccatcgaaggaacctatattgacaagaagtgccccttcactggcaatgtctccatccgtggccgtatcttggctg

SEQ ID NO: 48376 - DNA, 284 bp, Glycine max
  Clone ID: 701036944H1
actcgagccgaatcggctcgaggaagaaaacacgatcaaagagagactccaataaggggacaacggcaagcgtgacgacggtggatttatggactttgctaattcaatgtgcacaggctgtggctagctttgaccaaaggactgcaaatgaaacactgaagcagattaggcagcactcttcaccttttggcgatggacttcagcgtttggctcattacttcgccgatggcctcgagaaacggttagctgctgggacaccaaagttcatttcctttcagtcagca

SEQ ID NO: 48377 - DNA, 285 bp, Glycine max
  Clone ID: 701036945H1
aagatggagaagtatcagatctggagcaggagaatagcgttggcagcgtttgcgtttgctctgctgttccaatcggcctcagcagacgacgtcgttgtgctcactgaagataacttcgagaaggaagttggtcaggacagaggagctctcgttgagttctatgctccttggtgtggacactgcaaaaagcttgctccagaatatgaaaagcttggtagcagcttcaagaaagccaaatctgttttaattggcaaggttgactgtgatgagcataagagtttgtgc

SEQ ID NO: 48378 - DNA, 284 bp, Glycine max
  Clone ID: 701036946H1
tataataattatttaaaagttatatcaaattattaacaatcacttctggatgcttgatagtgaaatgtttttgtatgataagcatttaactcacaatacataagttgtcatatactataaactatgacttatgttaaatatgttaaactgaaaaccatgtgaatggagagatctacagtaacatattcttttttatgcttttatttactaatctcaccaattcaactgctataaactatgacttatgttaaatatgttacactgaaaaccaggtgaatggagag

SEQ ID NO: 48379 - DNA, 289 bp, Glycine max
  Clone ID: 701036947H1
cttcaaattctcagtgaaaccaattcagttcagtccaaatcccaaatccgaagtgagatttgcgatggagaggcttcagcgaatgttcgcaggtgcaggtggagctctagggcaccctcccccagattccccaactctcgattcctccgagcaggtctacatctcctcactcgctctcctcaagatgctgaagcacggaagggctggggttcccatggaagtgatgggtttgatgcttggagaattcgtggacgagtacaccgttcgtgtggttgatgtcttcgcaatg

SEQ ID NO: 48380 - DNA, 288 bp, Glycine max
  Clone ID: 701036948H1
cctctttgttcctaaacacggggcactggtttcgaaccctcgttgtggttaggtcttcttcacctttcgaattttggaatccatgggtcagggaactccgggcggcatgaaccggcagggcgaccggaagccggacggcggcgacaagaaggagaagaagttcgagccgtcggctccgccggcgcgcgtggggcggaaacagcggaagcagaaaggtccggaggccgcggcgcggttgccgacagtgactccggtgacgaagtgcaaactgcggcttctcaagctgga

SEQ ID NO: 48381 - DNA, 292 bp, Glycine max
  Clone ID: 701036949H1
aaacgcagagccaaaccatgtcgttccccttcaaccactctcacgccacccacacccaccaccgcagggacgacgacgacgacgaacgacccaccgtttaccctccgccgggaaactccttcagcaacccgccacctccgttctacggcgtccctcaaccaccaccccctcatccggagacccacgtgttccattccgctcacgtgacaccaggacacgtgtcccatgacttcaacaactactccgctcccccgcctccaaccccttcccaccatcatcatgatcgtcatca

SEQ ID NO: 48382 - DNA, 282 bp, Glycine max
  Clone ID: 701036950H1
agactgagtggtcaaagctccaatgatgtcaaattggtaaacaagaaacatctttctatcaagaagcagacacctatcagcagccagtcccaggacacttctgttgaacgccttatacgggaggtgaccagtgaaaagttttggcatcacccaggtatcaagtaattgtattattaccattagtgtagatgtataatgttattgataagctttatggtctctttgcattttgaattaaaaaacaaaaacaaaaaaagaaaagaaaaaaaaacaaaaaaagaa

SEQ ID NO: 48383 - DNA, 98 bp, Glycine max
  Clone ID: 701036951H1
atttggttgagctatggagtatcgttgcgttccattggttttctccctcgatctgattctggtgacaggtcatgctgccatacctctagaagtttagt

SEQ ID NO: 48384 - DNA, 271 bp, Glycine max
  Clone ID: 701036952H1
gagcaccaaggtaccatctaacattaggttttcaacaattgagattcaagcacgttggaatttttgttcattaggcactttgctgctctttgatgggtagttttgtatgaagagctttgtatagacagtcattcaaataccaacatttggatgaataaatattcttttcatgtgctgcatatctgtcatccgatttaagcgatggcatgatttggcacaatggtacttttggttcaatgttcatctataagcctggtctggctctttctcc

SEQ ID NO: 48385 - DNA, 302 bp, Glycine max
  Clone ID: 701036953H1
gctgaattcattcatagcagcaaacccatctccaacaacatgagttcccaaacacgcaacctcaactttgttctgtttcctctgatgtcccagggccacatgatccccatgatggacatagcaaaaattctggcacagaacggtgttactgtcacagtggtcacaacccaccaaaacgcatcacgcttcacatcaactttttctaattcccaaatccgattactcgaagttcaattcccataccaagaagcagggttgccagaagggtgtgagaatctcgacatgttaccttcacttggcac

SEQ ID NO: 48386 - DNA, 282 bp, Glycine max
  Clone ID: 701036955H1
gtttgttcattttgttgttcgaagccaaaaccctagcagccggcgagaatggcagacgttgaggttgatgcggcggcagcggcaggggcagcgcaccgaagaagagaacgttcaagaaattcagcttcaggggcgtggatctggacgcgcttctggacatgtccaccgacgaactggtgaagatgttcagtgcgcgtgcacgtagaaggttccagagaggtctgacgaggaagcccatggccttgattaagaagctccgcaaagctaaaagggaagcaccag

SEQ ID NO: 48387 - DNA, 282 bp, Glycine max
  Clone ID: 701036958H1
ctcctactacctattcggctttgcattcgccttcacgggcccctccaacggcttcatcggccgccacttcttcggcctacgagattacccaatgggctcctctccctccggcgactacagcttcttcctctaccagtgggccttcgccatcgccgccgcacgaatcaccagcggctccatcgccgagagaacacagttcgtggcttaccttatctactcttctttcttaaccggtttcgtttaccccatcgtttcgcattggttctggtcctcggacggttg

SEQ ID NO: 48388 - DNA, 283 bp, Glycine max
  Clone ID: 701036959H1
agtcaacctaccaacatgaagctgaacagcaagagtttgagattgtcttgcaaatcccacaatcccgggatcaaaatctcaacttgcacactacccaatttcctaattcgaattctccttctgtgtctctgttgtttcttggtccctgcatcttgttcccggaagcccccacctcttccaattttgcccctcccaacgactttccagctccaatggcaacttgacggcatggccctcttcttccacttcggcaccaacaccttcacagactcagaatggggca

SEQ ID NO: 48389 - DNA, 285 bp, Glycine max
  Clone ID: 701036960H1
atggattacactaggatacagaagtaatctgttatcgttattccttccaccctgcccggtggaaccaaacgaagaagacgttccgttttccctctgcttttccaagttttcatcgactcaaccatgctattcttacataactagggttaggagttagggcgttcttatcgttttcgctccgttaattacaacaacggccaacatggttgttctttcgctttcacctcccagcctctctaccgctttcctcgcaaagaaactgtctccccaagaacacgcggtgaa

SEQ ID NO: 48390 - DNA, 288 bp, Glycine max
  Clone ID: 701036962H1
cttactctagccatattcttcgccacctttctttctccaccttccatctccattcccctcccctaacttcccttcttatcattacaccactctctctctctcttcatcgcttacctttttcgtatacataagcattccctctcgttaatttcattagcatatcacacaaatcccactcttactcctttgccacgtacgccaccgctgatcaattcaggcgatggcgccgcgtctctggtcctgcttccgcagcagcagtagcaagggcagcaccaccggcggcggtgt

SEQ ID NO: 48391 - DNA, 309 bp, Glycine max
  Clone ID: 701036936H1
cggaattcccctcgagctgcgtcttaatggaggagagacagaagcacccttcttttccctccaactatctcactctcgctcaactccaagaacgatggctcaagcagcaaaaccaaatcaaccaaccacaaccacaaccacaaccacagccacaagaacaacacaaccaccaccaccgccaacaaccacaccaagagctggtactcgttcccagaaacggaaacgcttataggtctcgttctcagtttcagtatgttgcgaagaatcggaacgattccgaaactcgccgccgcgcaaccaaggttgcgg

SEQ ID NO: 48392 - DNA, 291 bp, Glycine max
  Clone ID: 701036914H1
cggctcgagactgatcataaatcacatagctagttgtttaaagtgagagaaaaagaaagaagaacatggcaaactttccagttgttgacatggggaaacttaacaccgaagagagagcagcagccatggagattataaaagatgcctgtgagaactggggtttctttgagttggtgaaccatgggatatccattgagttgatggacactgtggagaggctcacaaaagagcactacaagaagactatggagcaaaggttcaaagaaatggtggccagcaaagggcttgagt

SEQ ID NO: 48393 - DNA, 288 bp, Glycine max
  Clone ID: 701036915H1
gctaaagcaaacccagttgtcaaggctgaaaagcttgataagatctaagatttgaagttgaagttccatgccctgagatgaagttatgcacaatttcatcatgaaatgatccgagtttccttcacattttattggtgttcttattatattgttatatgtggtgggtgacttgagttattggacatctctgcaatttgaaggactctttcatgtgattggtgaaaatatatatgttggccactgttgtttttaagtgctggtttggtgaaagttggttggtgttgttag

SEQ ID NO: 48394 - DNA, 299 bp, Glycine max
  Clone ID: 701036917H1
gccgtttcgaaagcgctgacgctatccaccgcgccctcaccgccaccggcattagaagaggagccgttacctcacgacggcgacgattacgacggcatcgtttcactggacgacgagggtttcccgtcgcaattccccgaatcaggaacggcgtcggaaaagagcagtttcgccgcggatcgtctcatcgcagcggaaccgattggtcctcgctgttgttgtcgctggaagatagtaaacagagcgatttagcgcaagattcggggaagaagatgaagcaggccaatctgttccagatt

SEQ ID NO: 48395 - DNA, 292 bp, Glycine max
  Clone ID: 701036918H1
gtttccgatatccaaggggaaatggcattggtgttcaactaccaactggaaataaaggaactcctcttgagattgggaaaggtaggatattgattgaaggggaaagagtggctctcttgggctatggatcagctgttcagaactgtttggctgcagcttccttagtggaacatcatggtttgcgtgtaacagttgctgatgcacgtttctgcaaaccactggatcgttccctgattcgcagcctggcaaaatcacatgaggttttgattacagttgaagaaggatcaattgg

SEQ ID NO: 48396 - DNA, 295 bp, Glycine max
  Clone ID: 701036919H1
caaatcatcacacacacatactaagaagcaacaattcttctacaatggatctcctccttctggacaacaccctcataggtctcttcctcgctcgcggtggtcgccatcgccgtctccaccctccgcggccggaaattcaagctcccaccgggcccactccccgtcccaatcttcggcaactggctccaagtcggcgacgacctcaaccaccgcaacctcaccgatttggccaaaaaattcggtgacatcttcctcctccgcatggggcagcgcaacctcgtcgtggtttcttccc

SEQ ID NO: 48397 - DNA, 291 bp, Glycine max
  Clone ID: 701036920H1
ggcacacacagacacacacatttcgtcggaatgggaagggtgattcgcgcacagcgtaaggctgcggggtcggtgttcaagtcccacacccaccaccgcaagggtccggcgaggttccgcagcctcgacttcggcgagcgcaacggctacctcaaaggggtcgtcaccgatatcatccacgaccctggtcgcggtgctcctctagccaaggtggcgttccgccaccccttccgctacaagaagcagatggagctcttcgtcgccgccgaggtcctctacaccggccagttc

SEQ ID NO: 48398 - DNA, 289 bp, Glycine max
  Clone ID: 701036921H1
cctggttcctgcattgcgttgctctctctataccttctaattcccaaatttctagggtttggtacagagagaaaaaggaacataagatgtctcagaacgggaagctgatgccaaatctagaccagcatagcaccaagcttctcaatctcactgttcttcaacgaatcgacccttttgtcgaggaaattctcatcaccgctgcgcatgtcaccttctacgagttcaacatcgacctcagccaatggagccgcaaggacgttgaaggatctctcttcgttgtcaagaggaa

SEQ ID NO: 48399 - DNA, 289 bp, Glycine max
  Clone ID: 701036922H1
tccaccgtccattgcaaagtcttgcgcccaatttccatggaactgtaaagagaggatagttagaagattaaatcttaaagcagtaagtcatcatggataaatcagagcagactcaacagcagcagcaacaacagcatgtgatgggagttgccgcaggggctagccaaatggcctattcttctcactacccgactgcttccatggtggcttctggcacgcccgctgtaactgctccttccccaactcaggctccagctgccttctctagttctgctcaccagcttgcata

SEQ ID NO: 48400 - DNA, 290 bp, Glycine max
  Clone ID: 701036923H1
taataatgttttgaggacatttctctctccgaaccctcccatgcatggcctcttccgcattcctttccgtttatctcattatctccgtcatcgtccttttgtcgaacaggtgctgcacgtttcaatgcggggtttcctacgacacgatcaccgtcctcaacgcgttccctcacgacccacaagcctttactgagggtcttctttatcatggaaatgacaccttatttgagtcaactggcctttatggggagtcatccgtccgtaaagttgctcttcgtactgggaaggtt

SEQ ID NO: 48401 - DNA, 288 bp, Glycine max
  Clone ID: 701036924H1
agattttggagattgaagagatatcacaagatgctgcatattggattcgaagaattccacctcgcctctgggccactgcttattttgaggggcataggtttggtcatttgacagccaacatagttgaatctttaaacacttggatattggaggcatctggacttccaataattcaaatgatggaatgcattagaaggcagctaatgacttggtttaatgagcgccgggagaccagtatgcagtggacatcaatacttgtaccatctgccgagagacgtgtagccgagg

SEQ ID NO: 48402 - DNA, 284 bp, Glycine max
  Clone ID: 701036925H1
atcagttctctcatttctcgtcttcactgagaaaaatccttcttcgtgcatgctcctcgtttctatctaaaggggcgaaagagtagattataagggggtaagtgagaaagagagtaaaaacaaaattaaaacatgactatggaagagcggcagggtcgagaacgaggactacacacaagatggtactgtcaacattaaagggaaacctattcttagatccaaaagtggtggttggaaagcttgctcctttgttgttgtatatgaggtattcgaaagaatggctt

SEQ ID NO: 48403 - DNA, 283 bp, Glycine max
  Clone ID: 701036926H1
gttcaattactccttcaaatcaggtttgtgcgctctctatctctcttggttagttggaaaattttgttgtgcatgctttttggtgatgtatggaacctgaaagagagttcaagacttattagtggaagagtttctttctattgaggaaaggtatttattgctctctacttaggtaacataagccaacaattttagtagtaattaatggctggagaattgggagttttgaatgcacttgatgtggcaaagacacaatggtaccacttcactgctattgtgatcg

SEQ ID NO: 48404 - DNA, 288 bp, Glycine max
  Clone ID: 701036927H1
aatcaatcaatccctcatctcattgctgagatctgcaagctggctatggactacgaaccctacgacagtagcggaactgatgatgaccttccaccaacccatcaaaatagaatttccaggggaggaggaggacgtctcgctgggaatgggagatctgctgttggttcaattccttacccaaggatgtacggtgaaattgatatggagacccaaattcatcagcttgagcaagaagcatacagttcagttctaagagcctttaaagctcaagccgatgccattacttgg

SEQ ID NO: 48405 - DNA, 283 bp, Glycine max
  Clone ID: 701036928H1
cattttaatcctaattctgcacttcttgatcattcgattttactcctcaagatgcagatattcgtaaaaactttgaccggcaagaccatcacccttgaggtggaatcctccgacaccattgacaacgtaaaagctaagattcaagacaaggaagggatcccacctgaccagcagagacttatctttgcgggtaaacaacttgaggatggtcgcacccttgccgattacaacatccaaaaggaatcaaccctccatctcgtgcttcgcctcaggggtggcatgc

SEQ ID NO: 48406 - DNA, 289 bp, Glycine max
  Clone ID: 701036929H1
ctctaattttccgggaaaatttctctcactcttgctctctggttttccggcgtcagacgaggaagcagaagagtagaaggaagacatttctctgcttctacggaccctcttcccttcacttccttccctttcttttctcaatttccgtgatcatcacaattttcttcactcctcaatttcaataatcctccatgaaccccctctagcccctcctctccttccttctcttcaacaagaaactgactgaatatggagaaacattctgggaattcttcatcagctcatgctg

SEQ ID NO: 48407 - DNA, 283 bp, Glycine max
  Clone ID: 701036930H1
attttccctcactttctcgctcgccaaacgcccctctctctcctccaatggccgaccagctcaccgacgaccagatcgccgagttcaaggaggccttcagcctcttcgacaaggacggcgatggttgtattactactaaggaacttgggactgtgatgcggtcactagggcaaaacccaactgaggcagaactgcaggatatgattaatgaggttgatgctgatggcaatggaaccatcgacttcccagagttcctcaacctgatggctcgcaagatgaaaga

SEQ ID NO: 48408 - DNA, 293 bp, Glycine max
  Clone ID: 701036931H1
atttttgtagtccattgtatttttattgtgtatcaaattttctgtaacaaatgaaaggagaagaatcagtgcatcgtgttttttcactgtacaagctattggtacaaagaaaataaaacaaatatagtagcaaaaaaatgagaaagataaagaacaaaaaacttctagtcatagtgtagctgttaaaatcgagtttatttctattacaaattgtattctgtcatggcatagggaagaagaaactactagtgacatctattgtaaacgtggtcaccaagtaaaccagtgacttg

SEQ ID NO: 48409 - DNA, 291 bp, Glycine max
  Clone ID: 701036932H1
aaataactgaattttccgtgctggtttctgcccactgacacaagttgtagttttttaaaattatattatttacctaaaggatttcagattttgagttcatgagagcaatgtaaaagtgaagttctgaactgttaacaagtttggaaaactttgtgcagtgcagtgtgttaagatggaagctatgttcatcttcagaagcagtcatggaaaccagaaattgaagatttgaagtgatttcttcttagaaatcagaatactagaaaatactagcacagaaataatgtgggattt

SEQ ID NO: 48410 - DNA, 294 bp, Glycine max
  Clone ID: 701036933H1
cgcgcaaagcgcaaacccaaagcgcagttgttgctctttgaactcgaacgaagttctccgaagtcgaaacactcgttcgattcgctgaactctgaagttaatttctgttgcgaaaatgtcggtggcgaagaagttgattagatgcgtcatccttgacttggacggcacgctgctcaacacacttggcatcgtaggcaacgttttgaaggttatgttaggtaaatacggaaaggaatgggacggaagagaagctcagaagataattggaacgacgccgtttgaggccgctgctgc

SEQ ID NO: 48411 - DNA, 295 bp, Glycine max
  Clone ID: 701036934H1
attgcatttgctgctgaggtgactcatctctctctctctctcatctctccctctctctcatctctcccttccaaaaaaaagcaccaattttttcgaacgccaacgcgaatcacgaagagggtcaccgagaaaatgggtgtttgtgggtcgaggcccaaagtgaacgaggacctctcagcgaagaagaagaacaaccaccaccgaagaagaagaaggagaatcctcagaagacgcgtctcttctagaaagatcgaagctaacaacgtttctcactgtaattcagctcttcaagctt

SEQ ID NO: 48412 - DNA, 289 bp, Glycine max
  Clone ID: 701036935H1
ctctctctctctctctcactttgtcctccaaactcaagtgtcggacagtttgcttcttttccactctgaatcaccctatttattttgggtctctcatctttcttcttccttccaagttgtttttggtgttggtgttggtgttgaattgagttgagaagaaaagaagaggtcatagacacacacacaagacatgtctgctgttgagtcagctgaacacaacaacatcagaggagtaccaactcatggtggacgctatgttcagtacaatatctatggcaatctcttcgaa

SEQ ID NO: 48413 - DNA, 283 bp, Glycine max
  Clone ID: 701036913H1
cacttcttgaaccgtgccttaactaaactagagctagaattagagttagctaccttgcctaattcacaaacgcgtccctctacggctctacctattagctatcttctttgtgctgtgattgaacattaatttgtgatagctcaccatggccattgctacttgtgatcatgataagaacgcaaaggctttgcagttcattgaggatatgacccaaaacactgaaagtgtccaagagagggtccttgctgagattctcagccaaaactcccagaccgaatacctg

SEQ ID NO: 48414 - DNA, 301 bp, Glycine max
  Clone ID: 701036901H1
gtgtaaatctcaagatcagatcctcatctaccaccattccaggtgtagccatcaaaacaacgtttgtttaacaaaacccattatcagatcagatccgatcagatcctcttcagattcggatcaccgccgagtccatgagcacgccagcgctttcagggggcacgggcctcttctctggattcacgcgtttatgcaagggccttgcggtggtgcttgtttgcggtcacattgcggttcagtttatcccttcagctgttaactatcttgctcttattcccgccaggacaatcccatttgcctg

SEQ ID NO: 48415 - DNA, 297 bp, Glycine max
  Clone ID: 701036902H1
aaattacatagcctcaataatctgagagagaaacaaaaacaatgaaggtttccattgccaagttccactcccttcccctatgttttttccttctcttggccttcaacacaaaacccctcctagcagcagaaccagagccagtggttgataagcaagggaaccctttggagccaggagtagggtactacgtgtggccactttgggctgatgaaggaggcctcacactaggccaaacaaggaacaagacatgccctctttatgttatccgtgacccttcattcattggcaccccagttt

SEQ ID NO: 48416 - DNA, 296 bp, Glycine max
  Clone ID: 701036903H1
tgcctagccattgatttggaaaagtccaagcttcaaagatgagtaagcttcagagtgatgctcttagagaagctatctcacgaatcatgactgattccaaggaaaagaacaggaaatttgtggagaccattgaactccaaattgggctgaaaaactatgatccccagaaggacaagcgttttactggctctgttaagttgcctcacattcctcgccccaagatgaagatttgtatgcttggagatgcccaacacgttgaagaggctgagaagataggattggactacatggatgtc

SEQ ID NO: 48417 - DNA, 286 bp, Glycine max
  Clone ID: 701036904H1
tttttcttctatgaacacatggtggctgagttgaggggaagtacttagaaacagaaacacagagatgaaaccagaaacatctctgaactttactttgatgctgactttcttactttatctgaacttggttatgggagtgctgagcgttgatcattatcgcagagttgactttcctgatgaattcgtttttggttcaggcacctctgcttatcaggtggaaggagcttctaacgaagatgggagaactcctagcatctgggatacctttgcccatgcggtgtatgag

SEQ ID NO: 48418 - DNA, 293 bp, Glycine max
  Clone ID: 701036905H1
gtttttgcccaccacttttgctttttctgctcaaattctgtgctcatcgccctcgtcgtgttcactttgtcactgctaatggcatttttgctggggaaacggcgctcttcgcaaaacgaattggcaaaacggcgcagagacaaatcgccagaaggcattgaattggaggagaatcccgaggtgttcaaaagttctttgctgaaggactccaaagaacacatcatcagtacgtactttcctgatgtgcgcacacttttcgatgctttccaacgcggtctcaaagctgccgaaca

SEQ ID NO: 48419 - DNA, 286 bp, Glycine max
  Clone ID: 701036906H1
caaattttcggatctcttctgtttcttcgaatcaaaaccctaattcccccaatttcatttttcaaccttgaaaaaccttctctctctctctcagttcccaacggtcatcaccacagctcgatcaacagggacatatttgctactgaagagatgtctcctgcttccaaatctaagtctaaagacaaaaatgctggcaaggaagctcaaaagtcttctgccaagtcttcaggatctggtaatgccgtggctggtgtaccagctagtgcatacaatcctttatcgggaa

SEQ ID NO: 48420 - DNA, 289 bp, Glycine max
  Clone ID: 701036907H1
ggcactcaaacattgtttgttgtaggaagaggaatcttgagaaatggcaggggacagcaagagcaagattctgttcatcggagggactggttacatcggaaaattcatcgtggaagccagcgccaaagctggccacccaactttccttttggtgagggagtccactctctccaaccccgcaaaatcatccctcatcgacaatttcaaaggcctcggtgtcaatcttgttttcggagatctatacgatcaccaaagtttggtgagtgctataaagcaggtcgatgtggta

SEQ ID NO: 48421 - DNA, 105 bp, Glycine max
  Clone ID: 701036908H1
cctcgagccgaatcggctcgaggaaaaaaaaaaaaacagaacaaccctgaaactcaaaaccaacttaaaattattatggatcacattcatgggttacgttgtttt

SEQ ID NO: 48422 - DNA, 288 bp, Glycine max
  Clone ID: 701036909H1
atcaaaccaaaaaacacaacaaaagacagacagaaagacacaaagagttccttgctttgtagtaagatatatcatcaaaaatggttttgtcttggactagaagaaacgttttccgccgtgcaaagaaggagaaggaacaaagtcaactattagaagttgaggttgtgattcccaaacactttcgctgtccggtgagtttggagctgatgacagatccggtgactttatcaaccggcattacctacgaccgtgtgagcatcgagaagtggatcgagggagataacagaa

SEQ ID NO: 48423 - DNA, 125 bp, Glycine max
  unsure (1)..(125): unsure at all n locations
  Clone ID: 701036910H1
atgagttttaattanactatgctatggtaatgaaaccgcgtttttcgtgtttcacactttgttcttgacagagtcacccccaaaacaagcctaaatcgccttcttcctctttccttcttcttttt

SEQ ID NO: 48424 - DNA, 288 bp, Glycine max
  Clone ID: 701036911H1
ctcccgcatctcctcgtcgctccgccacgccttcgcgcacgccgaccgtggacggagctcatcgaccggagctccatgtcccgacccgacaccctcgccgaagcatactctcggatccgtaagaacttcgcctacttccgcgtcaattacctaaccctaatcgtgttggcgctcgcggtctcgctcatcacgcatccgttctcgctattcgtcctcttcggtctcctcgcgtcgtggtcgttcctttatctctttcgcccttcggatcagcctgtcgtcctcttcgga

SEQ ID NO: 48425 - DNA, 287 bp, Glycine max
  Clone ID: 701036912H1
tggtgacgagagccaccacccaccaccgcaagcgcaagctgaaaaggttactgaagttggatggtacgttcttggcgaggatcaacaacagattggcccttacgccttctctgagttgtgccagcatttcttgaatggatacctctccgaaaatacgtttgtgtggtctgaaggaagtagtgagtggcagcccttgtcctcggtttctgacctgtgggctcaaattaaccggcagggacctgattcttcaactactgtgtctgctcctgatgttgatgagtttgaaa

SEQ ID NO: 48426 - DNA, 249 bp, Glycine max
  Clone ID: 700967070H1
aaaaccctaaccctacctcctcgcccccatgcccatggctaagaaacgaaagcttcgatcctccaacccagaacccaccaaacccgtcgagccacagcaacagaaccatgagactgttgaactcgaccaacagcaacccatccccgaaccaaccctagaagactccaacaccatggccatcgacgaaccaaaacatgaacaagaagcagaaccgcaaaacgccgagagcgaacaagaggtagaggaaga

SEQ ID NO: 48427 - DNA, 247 bp, Glycine max
  Clone ID: 700967071H1
gacttgcctaatggattgggatattgaccgtaaattgttttccatgatactggatagttgttccacctcggataaaattgctgttagaattggtgagagacttctgcaaaacaggtttctttattgcaacggtcaattatttgatatacgctgtgctgcaaatgttattaacaccatggttcagcatgctctgggaactgtaagggaaatagtcaataagattcgtcaaactattggttacattaaa

SEQ ID NO: 48428 - DNA, 72 bp, Glycine max
  Clone ID: 700967072H1
gtggaactcttcttcaaatgaaattggtttacaatcacttggctcctctcttcctgttatttctacagtgga

SEQ ID NO: 48429 - DNA, 248 bp, Glycine max
  Clone ID: 700967074H1
ttctcgagccgaatcggctcgagctttgatgatgatgatgatggggaccttttgctagcttcaactttcttcttcctgtgtttgtatttgctaatagctcccatcaaaggcccaaaaatgggtaccatcgttgaagcagataacacatataccaagatcctaggaagatggccagtcttttattatggcatgggacacatgctcaatgacataactgctgcttgttggttcacatatttattattgtt

SEQ ID NO: 48430 - DNA, 250 bp, Glycine max
  Clone ID: 700967076H1
gtagcattcagtgaaacactagctagggtattgggagctctcgttgtttcggagttagggaccttacgcagccatggccactgctacgaatgccgccgccgccccaccacgccagctctcccagaaggaagctgacatccagatgatgttggccgccgacgtccacctcggcaccaagaactgcgacttccaaatggaacgttacatcttcaagcgccgcgccgacgggatttacattattaaccttggg

SEQ ID NO: 48431 - DNA, 249 bp, Glycine max
  Clone ID: 700967077H1
cggaaatatcgaaagagacagacagagcgacgtcggagaaagaaagaaaggaatgaatgaaagagggatggtaggagaaaaatgagaatggcgtgaatgtgaggagagaagagcctgaatattagaatcggatacccttaaagaagcggagataggagtgtgcgcctccaaacccaaggggcttcggaggggctcttcatcggaggcggtgctatattcccctccggattcccccaccatgaagagcct

SEQ ID NO: 48432 - DNA, 250 bp, Glycine max
  Clone ID: 700967079H1
gctaaggagaaatattgagaagcaggaagaagcaagttatggcgacgaagcagcttccgcagatcgccattctgggagctggtatctttgtgaagactcagtaccttccgagactctccgagatctctcatcttttcattctgaaatccatttggagccgcactcaggaatcagctacagctgccgtagacatagctcgtaagcattttccccaagtagagactaagtggggagataacggttttgatga

SEQ ID NO: 48433 - DNA, 257 bp, Glycine max
  Clone ID: 700967080H1
gagaaatggaattgcctctttcaagaagcatctgagtgtttattattcgtaatatatagtcactcaagcttctaggatttctgccagctacatgaaaatgggaagcaacttgaggtttttgagtctttgcctcttggcattgattgcatcaactcatgcccaacttcagcttggtttttatgcccagagctgcccaaaagctgagaaaatcattttgaaatttgttcatgagcatatccacaatgctccatcactag

SEQ ID NO: 48434 - DNA, 249 bp, Glycine max
  Clone ID: 700967081H1
cttagtcattgtttgctacatcaccatcgaaggcacttgcaagtcacgctcttaacactaacactcttcaatctctctctattttttcaatttcatggcattgggtagaaacaagactgtccaattagcattgcttctcctctgtttggatctgggaatagcgcatcagcatcagggtcactccccttcccattctggtttctgtgcttccgatgcccataatcactgcggtgatgaccatcatcatga

SEQ ID NO: 48435 - DNA, 247 bp, Glycine max
  Clone ID: 700967082H1
cgacgatggaggacgcggaacggcgaacacgcttcgcattctggtggcgacggactgccacctcggttacatggagaaggatgaggtgcgccgccacgactccttccacgccttcgaggagaattgcgccgtcgccgagcgccaccgcgtcgacttcgtcctcctcggcggcgacctcttccacgagaacaagccctcacgctccacgctcgtcaaggccatcgagattctccggcgctactgcctc

SEQ ID NO: 48436 - DNA, 246 bp, Glycine max
  Clone ID: 700967085H1
ctagtatccgatcctctgtcctctcgaagctttcatcgttcaacatattctcaccatctcagtcatgggcctgctatcttgttttaggtctaccgtcctgagaaaatgttccaaaggaagctctggcatgtcaagattcctgtatacgaacaattttcaacgaaacttgatttcgtctggtggcaatgaatcgtattatgggtattttaacaggagatcatacacttcactttatatgggaactgg

SEQ ID NO: 48437 - DNA, 241 bp, Glycine max
  Clone ID: 700967086H1
ctcgagccgttctcttgttctctctctcccaaactcaatccctgtgagtgctttctttctgtaactaacttgttccctcgttaaccctaatcatcaactcaagcagtgaatgaatctgtggacggacgagaactcctcggtgatggaggccttcatgtcgtcctccgatctctcctcaatctggccctcgacggcaccgccgcaatccacggcggtcttgaatcaggacaccctcgatgat

SEQ ID NO: 48438 - DNA, 242 bp, Glycine max
  Clone ID: 700967087H1
agaaaaatcaccggccagtcatactttggatgatagttctggtttcgatagcatgccaggtcatgatatcttgaatttgactgatgcacctatcaatgagggccagacgggatgctcaccacatggaaatgttgatcgagagagtcaagagagacagaaatatatggtgagaaaggctgataagacctcatggaagaggaaacgaagtatggaaaacgctggaagaagactaggtgtgacct

SEQ ID NO: 48439 - DNA, 246 bp, Glycine max
  Clone ID: 700967088H1
gcagaatcatttaagagtagctctaagaagaagaaaaaaaatatgaaggttgtgtacttccttgttgccatcttggctttgacatcctctcttgtctctgcctctgaccctagtcctcttcaagatttttgtgtggcagccaaagaaaaagatggtgtatttgtgaacggaaaattttgcaaagaccctaagcttgtcaaacctgaagatttcttcctacatgtggaacccgggaacactgacaac

SEQ ID NO: 48440 - DNA, 248 bp, Glycine max
  Clone ID: 700967091H1
gcataacagagacatccatcctcagtcattcgcaatggcccgacgactccttccactcacctccctccgccacctctccatcgccgcctcgcgtcgcctcctctcctctgcactccccgtcgctccccgcccctatccgcccctcaccgcccgcttcgccgtcgtccggtgcctctgcaaccgccccggagactcggcgtactcgcccctgaacacgggaaagcccacctccatcttgtcgtcgatca

SEQ ID NO: 48441 - DNA, 246 bp, Glycine max
  Clone ID: 700967092H1
aggaggtggaaaaagaaaaaggaagaaggaatgagtgcaacagtgactctaactctaaacctatgccgttcttccatcgtcgcttcttgtccacattatagccacaaaccaaaccctaatttcaatgccttttttagcttctctttgtctctgtctctgtctcaccacagacgcatcgttatctacaagaaaccattcccctctagacggacgtggctttatggatatatgaatagagatcgagat

SEQ ID NO: 48442 - DNA, 249 bp, Glycine max
  Clone ID: 700967093H1
ttttagtatcaatttctatatagctaaagaaagtgatactattaagcataattaatataatggggtacatgtgcattaagatttcgttttgtgtgatgtgtgtgttgggagttggtgatcgtgggtgatgttgcctacgctcaagattcagcagaagactacgtgaatgcacacaatgcagcacgagcagaggtgggttctcaatcaccaagacaaacagtgattgttccaagtttggcttgggatgat

SEQ ID NO: 48443 - DNA, 249 bp, Glycine max
  Clone ID: 700967094H1
caactccttctgttcacaaactcatcttcaattccttttctgatctacgcaaggttaaggttaattttatctatctacttggacatgaacgaaatcgatgttccttcgttctttctctgccccatttcgctagatatcatgaaggatccagtgacggtctcaacgggcatcacctacgaccgtgaaagcatcgaaacctggctgttctcgaagaaaaacacgacatgccccattaccaaactgcccttg

SEQ ID NO: 48444 - DNA, 244 bp, Glycine max
  Clone ID: 700967095H1
caccaattcattctcatacattccttcttcttcttcttcttcttctttcacaatcacaatggcgcgagtggatctggatggtaaccccatcaagccacttacgatctgcatgatcggcgctggcgggttcatcgggtcgcacctctgcgataagctcatgtccgaaacccctcacaccgtcctcgccctcgacgtctacagcgacaagatcaaacacctcctggatcccgccgattcccccctc

SEQ ID NO: 48445 - DNA, 244 bp, Glycine max
  Clone ID: 700967069H1
tggtgtgttgttttccattacacttgtactccttctgcgtaggattcgatgctgctactccttcttcagtttctacaactgagtttcatatcttctttctgttgatgtttatgctgaagactgaataaaaatctgagtgcctatggcgatgcaaactgtttatcttaggaagcatgaaggaaatgcacacaattttgtgggcacgttgtcgtctgcagcttcagcaccctggtggagtgctttt

SEQ ID NO: 48446 - DNA, 252 bp, Glycine max
  Clone ID: 700967040H1
agcgtgagagcacagcagtgtacgaaatgcctccgcggcggtgcacggcggcgtattcggcagtggcgcagatgggcagcaacacgagcgagagcgacgcggaggagctggtgatgcggtgcctctcgtgcgaggaggagtacgacgtggacgactcgggaacctgcagggagtgctaccaggaggccaacgaggccgaggaggagctccgccacgagatcgaggagctcaaatccaaagtctccttcctca

SEQ ID NO: 48447 - DNA, 251 bp, Glycine max
  Clone ID: 700967041H1
attctattccatcatcaatggagaacaccgagggatccggatctgcgacgaacggggtgctggctccgccgcgcaaggtggcattgataaccggaattaccggacaagacggttcgtacctgacggaattcctcctggacaaggggtacgaggtgcacggcctgatccgccgctcgtcgaacttcaacacgcagcgcatcgaccacatatacgtggatccccacaacgcccacaaggcccgcatgaagctc

SEQ ID NO: 48448 - DNA, 254 bp, Glycine max
  Clone ID: 700967042H1
cggggctacccgctgagtttaagcatatcaataagcggaggaaaagaaactaacaaggattcccttagtaacggcgagcgaaccgggaaaagcccaccatgaaaatcggtcgccctcggcgtccgaattgtagtctggagaagcgtcctcagtggcggaccgggcccaagtcccctggaagggggcgccagagagggtgagagccccgtcgtgcccggaccctgtcgcaccacgaggcgctgtcggcgagtcgg

SEQ ID NO: 48449 - DNA, 254 bp, Glycine max
  Clone ID: 700967043H1
ctttctccaagattaagtttcagtagtaatgggtaaggaaaaggttcacattaacatcgtggtcattggccatgtcgactctgggaagtcaaccaccaccggtcaccttatctacaagctcggaggtattgacaagcgtgtcatcgagagattcgagaaggaagctgctgagatgaataagaggtctttcaagtatgcctgggtgcttgacaagctcaaggctgagcgtgacagaggaatcaccattgatattg

SEQ ID NO: 48450 - DNA, 252 bp, Glycine max
  Clone ID: 700967044H1
ggtaaaagtgttgtcccaaagaaagaccatctttctcctttctgtcatcaccgttggaagagactgagatgggttcaaaaaccaagacttttacctttgaggaggtggctaagcacaatcacaggaaggattgctggattatagtcaaagggaaggtgtatgatgtcaccccatttttggatgatcatccaggaggtgatgaagttttagtgactgcaacagagaaggatgccaccactgattttgaagata

SEQ ID NO: 48451 - DNA, 256 bp, Glycine max
  Clone ID: 700967045H1
cttgaggtggaaagctctgacaccatcgacaacgtcaaggccaagatccaggacaaggaaggaattcccccggatcagcaacgtctcatcttcgccggaaagcagctcgaggacggccgtaccctcgccgactacaacatccagaaggagtcaacccttcaccttgtccttcgtctccgtggtggcatgcagatcttcgtcaagactctcactggcaaaaccataaccctagaggtcgaaagctctgacaccattg

SEQ ID NO: 48452 - DNA, 254 bp, Glycine max
  Clone ID: 700967046H1
gctttcctcagatatgcagcatccgcaggaggatattggaagattgcatgagctggcaattctaattggaatcttcagacgaaatccttcaaatagatttttatgataccattgacgaatctatcatagggaagggttttgacgataaaatccttggtctcctcaaagttgcatgtgactgtgttaaaggatctttaaagcaaaggccaaagatggttgatatgcacaaaactataagagccatgtgggaaggc

SEQ ID NO: 48453 - DNA, 261 bp, Glycine max
  Clone ID: 700967048H1
atcttcttcccaaccactactactcactcactgcagatctcaattgcatcgctgtccatggctaccatcgttagcatcaaggcccgccagatcttcgacagtcgtggcaatccaactgtcgaggtggatttgacttgctccgatggtacttttgccagagctgctgttccaagtggtgcatccactgggatttatgaggcccttgaattgagagatggaggatctgactaccttggaaagggtgtatcaaaggctgttgac

SEQ ID NO: 48454 - DNA, 252 bp, Glycine max
  Clone ID: 700967049H1
gcgagagagatgatcttgctgaaactaaaatagtggatggtcttgctgaaactaaaatagtagatgatggcacgaaggagaagaatgctgaatctagtttcaagcgagataccgaatgagcaaagcatagttggcatatgtatcttctaattcgcattttatcttgtctttgttcatatcttgtaataagctatagtccttctatgcgggtgatttacattgcgcagatgtgtaattggcaggagtttccat

SEQ ID NO: 48455 - DNA, 250 bp, Glycine max
  Clone ID: 700967050H1
caaaaccctaagggttcttccaatcgccgccggattttaacccttacattgtcactctctcattccatcttgttgcacgaaccctcacctcaatttcacccttattactgatttcttttcactaattatgccgtgcttaaatttgttttcccaacctgactgattcttcagttagttttcgtttcagctctgcgaatgacctgggtataattttcatggccataatttattgtgactattattgttttga

SEQ ID NO: 48456 - DNA, 254 bp, Glycine max
  unsure (1)..(254): unsure at all n locations
  Clone ID: 700967051H1
gtaggtactcagtgaagaggttcaggaaggcgcagtgccccattgttgagagactcaccaactctctcatgatgcacggaaggaacaatggaaagaagctcatggctgtcaggattatcaagcatgcaatggaaattattcacttgctcactgacctgaacccaattcaggtcattgttgatgccgtcatcaatagtggtcnccgtgaagatgcaactagaattggttctgctggagtggtgaggagacaggcc

SEQ ID NO: 48457 - DNA, 244 bp, Glycine max
  Clone ID: 700967052H1
aaacgacttaatagaaaaacgaaggaacaaactcaaagatgaaggtaaggtatgtggttaagaaaagagaatagagaaagaaagaagtgaaaatggcatcccatattccattaggattttattgttgttgttgttgttataaaaaagaaaagaaaagtggcgcacgggtgagtagtgagtagaagcataataataaccctgttagttgcgtgcgtgcgtgttaggggagagaaggataagagag

SEQ ID NO: 48458 - DNA, 252 bp, Glycine max
  Clone ID: 700967054H1
tccaccttggcctagccagctagcgcttcttctctcgacattccgtggagatctagtgctgccaaacctcgctgcaaattagggtttcgtttcggatgtagacgaagatgttcggaagggcaccgtagaaaagcgacagcaccaggtactacgagatcctcggcgtttcgaagaacgcttcgccggatgatttaaagaaggcttacaagaaagccgccattaagaaccaccctgacaaaggcggtgatcctg

SEQ ID NO: 48459 - DNA, 247 bp, Glycine max
  Clone ID: 700967055H1
tgggaagatcgtgttgtgtgaccgtgggttgaccgctagggttcagaaaggctcggtggtgaaatccgccggagcgttggggatggtgctgtccaacaccgccgctaacggcgaggagctagtggcggatgctcatttattaccggccaccgcagttgggcagaaagccggtgacgctattaagaagtatttggtttccgatgcgaaaccgacggtgaagattttttttgagggaaccaaggtgggg

SEQ ID NO: 48460 - DNA, 252 bp, Glycine max
  Clone ID: 700967056H1
cttttcctttccttcatttgaaattgaccttacccacccagatcccaaattcccaccttgtaaattatccgccttattttcccattccaaggaaagaagccaatccacgaccgatccaatgccgctttgaatcgcgtgccgtcctccttccgtgggaacatctttgttgcttttgaattcgatttttggagcagttgggccgatgagtaacatgtcacactgtttctgaaacacaaaaagacccttttcttt

SEQ ID NO: 48461 - DNA, 250 bp, Glycine max
  Clone ID: 700967057H1
aaagcttttgtttctctctgcttatggaaggcccttaaactttcgctctctctgcttcactttctcgcttttgcattttcttgtgaaaaaaaaaatcctcagaacaaaaataggtcttcttcttctctgatctaccaaagcttcaaattctccttagtttggtttgtctgtgagtttggagtgtaatgtcgccgccgacgctggtaacggaggaggaggggcggacaccgtggcgtccgattcttcgcaa

SEQ ID NO: 48462 - DNA, 251 bp, Glycine max
  Clone ID: 700967058H1
tgatgatgttataacttgtaagctttccctgttctacctttttcttttcgtactcataaaactacttttctgacatctcatcatattctgttctccgaaggtaacagctgcttcttctggttccattttgcatatctctatcttcatttgattttcaattttcttcatttggggaagtgggtaatgtttttcgtggcacccaattgcttgttttaaattctcactaccattttagtggctagagattgatc

SEQ ID NO: 48463 - DNA, 253 bp, Glycine max
  unsure (1)..(253): unsure at all n locations
  Clone ID: 700967060H1
gttgttttctctgtttgcagcttcttctgtttctctctctcaaattcaatgttgttcatgttcatgtctatgtccatttgaggttgagagagagaggcactcagatacgtttccgttcagagacagacacaacacaacagaaagtgttcagagagagaaatagtgaacgcaacaaaacaatgtcttctctgaatntgttactattttctctgagcagngctttgtctagtcccatcgccgttttctttcagat

SEQ ID NO: 48464 - DNA, 255 bp, Glycine max
  Clone ID: 700967062H1
taagagagcgatgttggtgttccgaagattgatccagaatcctcctatgaatgacgataagagatgagagaacaaagctttggagataaaatgcatggaataactctccctctcactgcaactgcaaatagcttccttttgagatctcctctaccaagttgtttcatacccacttgtaaagttagctacggatttcgttttaaccattctcagtggaagcaccataaaacagaaggatggagcaataggaataga

SEQ ID NO: 48465 - DNA, 258 bp, Glycine max
  Clone ID: 700967063H1
agcctcttgtctccttacttgcaaagccggaacagaaatcgcatataaaatgcgaaaagaaatgaattcaatgttcggagatctgcacaggatctctctccgtgtccgttgaactttctttacgccctcctcgtaacataaaaattcagatcccgccaactctgaagacctctattctctttccctcccctttccactttcccgagaaaaataaacttttccgtcaattttctctccacggtttccttcttcctcaca

SEQ ID NO: 48466 - DNA, 268 bp, Glycine max
  unsure (1)..(268): unsure at all n locations
  Clone ID: 700967064H1
tctcgagccgaatcggctcgagcgttttttcagcatatgtctcaaaggcccacggttcctcactcctcttccatagcctgcggccttcactctcatctcctggtctccagtgagatgaaccctagctccaattggtccctttaatcaattacctcttaattagtaattacttaatctcaattagcctttcactctcccacacaacaacatcaccggngtcaaaggttttgtcgaaggaggcatcgcttccatcattgcaggctgttcc

SEQ ID NO: 48467 - DNA, 253 bp, Glycine max
  Clone ID: 700967065H1
caaatacagaaaaaaagagtcaagcggcgagcaatggcgacatcgctggtgcgatcgggttttcttcgaagcgccctaagaggaagcgctcgtggctcccaggttccgaagcgaaactttgcttcctctggtcatcacgatgatgcatatgagacggccaaatgggagaagattacatatctaggcattgttagttgcactggtttagccgtttataatctatcaaagggccacccacacttcaaagaacctc

SEQ ID NO: 48468 - DNA, 251 bp, Glycine max
  Clone ID: 700967067H1
ctcgagccgtgttctcttccttggaatacaaaatgcttcctctgttcagccagtggtagcagttgaaaggactgtcttttatagagaaaaagctgcgggaatgtattctgccttaccctatgcatttgcacaggttctggtagagataccatatatcttcgctcaagctgtgacatacggtttaattgtttatgccatgatcggatttgactggactgcagagaaattcttttggtatctatttttcagtt

SEQ ID NO: 48469 - DNA, 247 bp, Glycine max
  Clone ID: 700967068H1
tagagatcctccgtttatatgcttgtccatatctagaaacacttcctcctagcatgtgtgacatgaagagattgaagtatattgatatttctcaatgtgttaacctcacatgcttccctgaagagattggtagattagtatgcttagagaagattgacatgagggaatgccccatgattaggtatttaccgaagtctgcagtgtcattgcaatctctgcagcttgtaatttgtgatgaggaggtaca

SEQ ID NO: 48470 - DNA, 255 bp, Glycine max
  Clone ID: 700967037H1
gcaggccttcctgtttatttcattgagccccatcatcctgataagttcttctggagaggaaaattttatggcgagcatgatgatttcagacgattttcattttttagccgtgcagctcttgagtttcttcttcaagctggcaagaagccagacatcattcattgccatgattggcagacagcattcattgctcctctgtactgggatatatatgccccagaaggattaaattcagctaggatttgctttacatgc

SEQ ID NO: 48471 - DNA, 252 bp, Glycine max
  Clone ID: 700966990H1
ggatggctcaatacggttagtaatgctgcgtcttctgcggcagggaaagtctcaatcccatctggtgctgtttctgctgtctttcatagttccattccttataattcacacaatgcatactcaaaaattcatgccatggagcacttattagtttataccccttctggtcatttaattcaatataaactactgccaccattggtggcagagccaagtgaaactgcttcaagaacagccccagttccttcagca

SEQ ID NO: 48472 - DNA, 253 bp, Glycine max
  Clone ID: 700966991H1
accaaatccaaattccaatgcttcttcttccttcttcttatttcaatttcaatcactactacttcacgcttttgtttctccatttttaaaccctaaatctatctatctaatagagataagatagggcaaaaacaaaaccctagccaaagaaaaaccttgttgagcagcaacagcagcagcagcagagagagaggaatatggaaggagtaccgcacccaatacccagaacagtcgaagaggttttcaccgattt

SEQ ID NO: 48473 - DNA, 252 bp, Glycine max
  Clone ID: 700966994H1
aagaaagcggtttcacagaccgagaaatcccaatcctatggcagaggaagggaaacccgatgaacagctctttcagcttctctccaatcttctccaccaggtggaatcactgacgaatcaagaagaagttgagctgcgttctaaaattgaaactcttggattagaggttacaaaagttccttcaaagtcaacgcagcaccttaacgaggtgtttttcacttgatgcagagttctcttatccctgttgaaatg

SEQ ID NO: 48474 - DNA, 97 bp, Glycine max
  Clone ID: 700967001H1
ctttatttttctcgttttttttttttttataaaaaaaaagaaaaaagaaacatattcttgcaatttcgttgtacaaacaaaattcccctattttggg

SEQ ID NO: 48475 - DNA, 262 bp, Glycine max
  Clone ID: 700967004H1
ctggtcttggtttcgaggctctccatcaacctaccctacacaaccgagtgtttccgcaacttcatgggtagccctcgcttcgtttttctcctgggaaacgtcatcatcataacgctcttcgcacaatctggccacttttcatcttcagccaaacgtgccccagaacctgcagatctctatctcgagttcctccaaaacaccaccatccatcagaaacttcaagtccacgtcagcagaccaaagccaagtgcgagagtattgg

SEQ ID NO: 48476 - DNA, 258 bp, Glycine max
  Clone ID: 700967005H1
gccagcttaactcttaggggaggagaaaaacccttagccgccagcagtcgttgaactcattcttcttcaactcaacagagcaagggttcgcactcgcagattcttgagcaagaataatggggaagaaaagaaaacacagtgagactactcaagctgtagcacaacccaaaaaggaagaggctgctccagagagaccggctaggacccttttggggtggaaggataagaatcaagttgaggatgattcaccaatattta

SEQ ID NO: 48477 - DNA, 259 bp, Glycine max
  Clone ID: 700967007H1
tctttctcttgtttattatctcagatagatgatcacaaggccccaatgatgggaagagtcatggaaaaaccaagccaagatcttcttcagcagcaacaacaagccctaaagtgccctcgctgcgagtcttcaaacaccaagttctgctactacaacaactacagcttgtcacagcctaggcacttttgcaaagcctgcaagcgttactggacaagaggtggcactctcagaaacgttcccgttggtggtggctgcagaa

SEQ ID NO: 48478 - DNA, 253 bp, Glycine max
  Clone ID: 700967008H1
agaaatgagtacgctgcgctgcaaaaccagcttcagctgcttaagcagaagcaggtggcgctaatcgacactttgcggcaattagagacagaaaaggttgatctggagaacactgttgttgacgagagccaaagacagttgaatgatcaagaggcttcctctagattgaggcaggagaaatctagtgcaagtgcaagtgagtctgaggatgataacgagagaaatgatgcagccgaggaagaaacagatgaag

SEQ ID NO: 48479 - DNA, 260 bp, Glycine max
  Clone ID: 700967009H1
gtcgtcatttcctcacaaaaccagtgtccgtaacatctccaccttaacgatgtcggtaaaggagtgtcaccaccacaagggaaagaagcacaaactctggagacgcatcttctggggcatagtgatcttcgccttcatcgtgttgctaacagttcttataatctgggcaatcctaaagccttcaaagccaaccttcatcctccaagacgtgaccgtctacggcttcaacgccaccatccccaacttcctcacctcaagct

SEQ ID NO: 48480 - DNA, 259 bp, Glycine max
  Clone ID: 700967011H1
cccaaaagaccctttctttcaatattcatagcatcatcatgggtgactcttccgcggctaatgaccatttgggtgaatccccggccgttgagttaaccggaaagataatgattgtggttattattatcatgttcttcgttattgtaattgctctctgccttcatctcttcgccagaaacttctggtggcgcagcctgctccccaatctcgcagccaccgccgccgccgctttgttttctcgtccggtccagacggtgga

SEQ ID NO: 48481 - DNA, 259 bp, Glycine max
  Clone ID: 700967012H1
attttccctcactttctcgctccccaaacgcccctctctctcctccaatggccgaccagctcaccgacgaccagatcgccgagttcaaggaggccttcagcctcttcgacaaggacggcgatggttgcattactaccaaggaacttgggactgttatgaggtcacttggtcaaaacccaactgaggcagaactgcaggatatgataaacgaggttgatgctgatggcaacggaaccatcgatttcccagagttcctcaa

SEQ ID NO: 48482 - DNA, 260 bp, Glycine max
  Clone ID: 700967013H1
gcttctaacgtcaccgactcagttgctgtcagcgagtgagtgagtcgtttctctgcagcaacaaggtttagccactccaaacagacgggaaatgggtcgtggggtcagtgctggtggtggtcagagttccttaggttatctctttggcagtggggtgcctgccagcagtgcaaacagtcagcctgcaaatggtgctcgcactcaaaatgctagtgctccttcaccaccagtcgataagcaaagtccagcaccagcaccag

SEQ ID NO: 48483 - DNA, 262 bp, Glycine max
  Clone ID: 700967014H1
ttcttctcttgcggctagggttttagcgcacttcttctagatttaaggaagatgggtaaggaaaaggttcacatcagtattgtggttattggccatgttgactctgggaagtccactaccactggccacctgatctacaagcttggaggcattgacaagcgtgttattgagagatttgagaaggaagctgctgagatgaacaagaggtctttcaagtatgcctgggtgcttgataagcttaaggctgagcgtgaaagaggaa

SEQ ID NO: 48484 - DNA, 96 bp, Glycine max
  Clone ID: 700967015H1
atcgcgagcaacgcccttatatttttttgtttttttgaaaatgtttaaggagaattggggacgaaaaactttccccaaatttggcccccctgggaa

SEQ ID NO: 48485 - DNA, 267 bp, Glycine max
  Clone ID: 700967016H1
ggagttaggttctgcacgctctgcttccagcgagtgttctttcttcgtttcaacaccttaatttgcacacgctgcttcttcagcttgagaaatggcacaagaaacctttctattcacatctgaatctgtaaacgagggtcaccccgacaagctgtgcgaccagatctctgatgcagtgcttgatgcgtgccttgaacaggaccctgacagcaaggttgcctgtgagacatgcaccaagaccaacatggtcatggtctttggagagat

SEQ ID NO: 48486 - DNA, 85 bp, Glycine max
  Clone ID: 700967017H1
caaatacagataaaaagagtcaagcggcgagcaattgcgacatcgctggtgcgatcgggttttcttcgaagcgccctaagaggaa

SEQ ID NO: 48487 - DNA, 260 bp, Glycine max
  Clone ID: 700967018H1
aaaattcctattcttcttctcatttcaactctttgcaattgcgatctttcattcctttttttttactcttggtaagcgtagttcggtgttggagaaccagcttccagttccagaatactgctgaacagagttcggcttcgctttattgggactcagttgtgtttctactaggttatcttctctgaattgcaaatgaatgatcgttgaaaaaccatgaagaaggtgaggagaaagatcggcaagtatgaggtgggtcggac

SEQ ID NO: 48488 - DNA, 257 bp, Glycine max
  Clone ID: 700967020H1
acgcgcaattcgctgctgataaacccgctcactgcaaattgttgtgatccctacccatccatccttcatttccatctcgtttttttgtttcaaacaaagaaatctttatttttttcctattatattttcaatcacgcgaaagtgaaagttcttcggttgttgctattgctcattcattttctcaggggaagaaaaatcatttttgttcccccggattacgttcctagataatagcttttagccaaatatcagatatc

SEQ ID NO: 48489 - DNA, 258 bp, Glycine max
  Clone ID: 700967022H1
tctcgagccgaatcggctcgagcgggtttataaactccctaatgacaaagaggctgtttaaggggcgttagacaaatggacagcttgggaaacagagttccctgtgattgcagtgtctaaggctttaaaaatcttaaggaaaaggggtcactgggttcgtgtaattcaagtagctaagtggatgttaagcaaaggtcaaggagcaacgatgggaacatatgacacccttcttctggcatttgatatggacaagagggt

SEQ ID NO: 48490 - DNA, 256 bp, Glycine max
  Clone ID: 700967023H1
cttgtgttgttattttatttcatctgcatctgcatctgctacgttgtgttgagcagtgagatctgtatcgtcaaaattcatgatttcgtgttgaatgcatcgtccgagttaggttaatttttcgacattttttggtgtaaaatggaggtgccaactaggagaaaacccgtgatctactggatttgccttttcgtcattgtcaatgcgtttgtacaaattagcaatgcattttatcttccgggaagctacatgcaca

SEQ ID NO: 48491 - DNA, 255 bp, Glycine max
  Clone ID: 700967024H1
cgcactcctcctcctcctaggtggaattggaattggggatctactagatgggcctaatcagaagcatgagatcgcggtcacagcgtgtggtgcaggagcaagaagctgctgagtgtgtcggtgtcgtcgtcggcgacagcatgcgacagagttgttgggccaacatgccccaagagcttctccgagaggtcctcctccgaatcgaggcctccgaggacacgtggccgccgcggaagagcgtcgtctcctgcgccg

SEQ ID NO: 48492 - DNA, 256 bp, Glycine max
  Clone ID: 700967027H1
ctaatttcctcaatcctggttttggaattcgacaatggagcagaagaggagcagcaagatgtacaacctgttcgtgaagcacttggacgggaaaaccctaaccctcctattcccctctccgatcctctacgcgagttccatcaaggatcgcctcttccaactcactggaatccccgcccaccaccagcgcctcgtcaccggctgtcgccacctcaacgatgacaaatccgctatccagtgctccccgggggacggc

SEQ ID NO: 48493 - DNA, 261 bp, Glycine max
  Clone ID: 700967033H1
tggcgtcttcataaacgccgcccaaaacttctcatacccttttattcattccattcctttctaagggttttcttttctttgccgagaaaatgagagagtgcatttcgatccacattggccaggccggtatccaggttggaaacgcctgctgggaactctattgccttgaacacggcattcagcccgatggacagatgccgagtgacaagaccgttggcggaggagacgacgccttcaacacatttttcagcgagaccggcg

SEQ ID NO: 48494 - DNA, 257 bp, Glycine max
  Clone ID: 700967034H1
cagaaattgtgatcctgaaggtcctctgatgctctatgtctccaagatgattccagcatctgataaggggagattttttgcctttggccgtgtattctctggcagggtttcaactggtttgaaggtgaggattatgggacctaattatgtccctggggagaaaaaggatttgtatgttaaaagtgtgcaacgaactgtcatttggatgggaaagaggcaagaaactgtagaggatgtcccctgtggtaatacagtgg

SEQ ID NO: 48495 - DNA, 252 bp, Glycine max
  Clone ID: 700966989H1
agcagcagcggaagctctagcttgggcagcgaatcacaatggcgagaggattgaagaagcatttgaagaggcttaatgccccaaagcattggatgcttgacaaactgggtggtgcatttgctcctaagccctcatctggaccacacaaatccagggaatgcctgccactcatactcattttgcgaaaccggctgaagtatgctctgacataccgtgaagtcattgctattctgatgcagcgacatgtccttg

SEQ ID NO: 48496 - DNA, 255 bp, Glycine max
  Clone ID: 700967035H1
ctgatgagcagatagaaagagaagagaagttgatgtcaacagcagaagctcctcctccgttccaagaagcagcgcgatgcgttgtgtgcaattgcagtttcaacaccttcagaagaaggcatcactgtcgatcctgtgggagaacattgtgcaatgaacattcatcagatcaaatggctttaccacaatttggcatttactcaaatgtccgagtatgtgctgattgtttcaacaactcacggtctgggaaggatg

SEQ ID NO: 48497 - DNA, 253 bp, Glycine max
  Clone ID: 700966951H1
tatatatctggaatggcatttacacctgagccagtagttcccccagtcagtgctcgccctgatcaagtggaaaaggttcttaaaactcggtatcacgatgccaagaataaactgcaaggaaaagagcttgatttactcattgttatcttgccggataataatggatcactatatggtgacctcaaacgtatttgtgagacagatctaggacttgtttcacaatgttgctaactaagcatgtcttcaaatgagc

SEQ ID NO: 48498 - DNA, 272 bp, Glycine max
  Clone ID: 700966952H1
cttctccttgctttgaccttttgccggttgttgtgttgcattggtgcaaatggcgttcttcagaagcgtttctgcactttctcgacttcgctctcgcgtgggccagcaatctaatcttgcgaattcagttagatggctccaaactccgagctccagtaacactgatctttattctgagttgaaggaactagttccagagtatcaggaacgtgttaagaagctgaagaaagatcatggaagtgttgaattgggaaaaattactgttgatatgg

SEQ ID NO: 48499 - DNA, 258 bp, Glycine max
  Clone ID: 700966953H1
caggcaagccccactcaaccaccacacctctcctcgttcacgctacccctttctgctcttcttctacctttcaagttttaaaagtataaagatggcagagacattcctatttacctcagagtcggtgaacgagggacaccctgacaagctctgcgaccaaatctccgatgctgtcctcgacgcttgcctcgagcaggacccagacagcaaagttgcctgcgaaacatgcatcaaaaccaacttggtcatggtcttcgg

SEQ ID NO: 48500 - DNA, 253 bp, Glycine max
  Clone ID: 700966954H1
ggaagcgcttctcacttgcccacaataagaattcctctcaaatttcaatttttcatttgaaaataataaaaccctaaaagaggggttgcaagcaaaatgagaagctcgaagatgtggatggttttcatgtgtctgacggtgagcttcttcgctcgcattgaatcgctatccgtgacggtgaacgacgtcgagtgcgtctacgagtacgtactttacgagggcgacaccgtttcggggaactttgttgtcgtcg

SEQ ID NO: 48501 - DNA, 255 bp, Glycine max
  Clone ID: 700966955H1
aattacaacaccaatctcacccatttcaaaaaaaggccgttagtgttactattcgtaaaatggccactcttgttctttaccaattctttctcaaactcttgctcctaatttcagtctttcagctttcctttgctgctaggagactcaaccagctggttcaggaccagtcacagttactccattaccacaacggtcctcttctatacggcaaaatcgccgtgaacctaatctggtatggtcacttcaaaccatccc

SEQ ID NO: 48502 - DNA, 259 bp, Glycine max
  Clone ID: 700966956H1
aatttattaattttatgtttttatggctttccacgaccatctccagcacgacatagcgttccagcgtttcacggaggagcaagagttgaccgagaacagagacatgcagcagaggctcccacctccgacatggctcaacaacgttaacgcgcgtcaacagaatttcctcgacaccgagaagagcgtggatcggaacaaccgaagcgagagcaattgcgaatccgaggatttgagggaatacaaagcggacattctaggt

SEQ ID NO: 48503 - DNA, 254 bp, Glycine max
  Clone ID: 700966957H1
atcctgtcttctcgtgctggccagtctagagctgactaagaaaggagttgtgctgcaaaatattctttgaccacccatctgttttaacctctttttagagggggtgagggaggtaattattagtttttccgagcttagcaatgttcaggcagcattttcaggctttagcaattgtgtgaaagttcaattcaccatttgtggtgtttgtttgtgtaattaggtttatgtttacttaataaagcttcttaagcttc

SEQ ID NO: 48504 - DNA, 255 bp, Glycine max
  Clone ID: 700966958H1
gttaatgatttaggatatacaaagagatacgtgcgctgcctacagatatcagaagtggtaaatagtatgaaagacttgatagattacagcagagaaactgggactggacctatggagagcttagcaaaattccctcggagaacaagtggttcatctggacctcgtggtcaagcacaacagcatgaagaacaattacaacagcagcaacaacaacagatggtggcccataactcaaatggtgatcaaaactcagta

SEQ ID NO: 48505 - DNA, 257 bp, Glycine max
  Clone ID: 700966961H1
tgtttatcactatcacttccccttcctatctctgaagccattctcgttcattttgtctttttatcttctctttatctccctcaacaagattcctataaagttcgtagcggctttcacacaactttaagaatcattgtatggagccttgcaccaatcaactgacacctctttttaacgcagaaaatctcgtgaatccgtgatcgcaaacaaaacaatgtctcccccttctatgttaggcaaccgcaaagacggttctg

SEQ ID NO: 48506 - DNA, 256 bp, Glycine max
  unsure (1)..(256): unsure at all n locations
  Clone ID: 700966962H1
cggctcgagctcgagccgattcggctcgagaatagtgttaatttgtctttctctatctctatcgactatgagtngttttgcttttgatgaggaaaactcctccaccgtggctccggcaacactctacaaagctctgacaaaagatgctgacactatcatcccaaagattattggggccatccaaactattgaaatcgttgaaggaaatggaggacccggaaccgtcaagaagataacagctagtgaaggtgaccaa

SEQ ID NO: 48507 - DNA, 256 bp, Glycine max
  Clone ID: 700966963H1
gcgattttcggtgaaaaagagtggtactttttcagccccagagacaggaaatacccgaacgggtctcgacccaacagagtagctgggtcgggttattggaaagccaccggaaccgacaagatcatcaccaccgaaggtagaaaagttggcataaaaaaagccctcgttttctacgttggcaaagcccccaagggcaccaaaaccaattggatcatgcacgagtatcgcctcctcgactcttcccgaaagaacactg

SEQ ID NO: 48508 - DNA, 256 bp, Glycine max
  Clone ID: 700966964H1
agtctgtgttgctttgtttgccgctttcttctctttctccgtagcaggatgtcatctgtcttagttgattagggacagttcattttacataacctgcgtcgtcaaatatttcaacatacacaaattatttggttgcatgccccattcatactacagtcaaggagtactggactattttctttataaaaatggagtacttgacttggtgaagattgtgaagcttgtagttccctgattcctgtgcggcactaaattt

SEQ ID NO: 48509 - DNA, 261 bp, Glycine max
  Clone ID: 700966965H1
gttgattgatcgatgattgatgatggttcgggcgtcggtgaaggtgggttccgccaagttcgtagtgatctgcgtggggcttttgggcttcgctctcgtcgccgactttctatgggcctctacctcttccactcttcccacctccaccaaaccctccgcatttgtggttccctccaaccacaataagaagaaatatgagaatgccactgcttctggaagattccttgccgcggcttacgccgatttggatgcgccgcagct

SEQ ID NO: 48510 - DNA, 262 bp, Glycine max
  Clone ID: 700966966H1
atgtgggtgagaggaagaagaagaagcaaatggagtttcaacgcagcgattcatcatcgtccccgcccacacccaacaacgccgatccgaagaaaaacacttgttctgacccaatgcattcatggtgggaatcagtctcaaaagcccgttcccgaatccacgccctcgccgccatcctcccctcctcctcctccgactctctctcctctttagcggactccgaccgccccgctttgtcgttactttcctcccccgccgccta

SEQ ID NO: 48511 - DNA, 258 bp, Glycine max
  Clone ID: 700966967H1
ccgagttgtgtcgagttgtgtcaagtgtgaactcaaaacatctctctcaatctctcaccctgtttaggttttgttttggagtggtgttgctatctctatagctccatgaactttttctgacacaacccaacccaagaggaggagggggatgaggaagaagatcgaagaagaacaagatatgttgcttggaaaacgtcctcgggcaccgattatgaaaagaactacaagcatgagtggtggtttggccgtggaaaccaa

SEQ ID NO: 48512 - DNA, 146 bp, Glycine max
  Clone ID: 700966970H1
caaagctcccctttcacatttcaattctctgaaccctgctctccattttgtctcttcctttctctctctacaaagagtgcgtgtgagagtgagagagagagagagggatttggaactttggatatctatagcgaaagcgagacacc

SEQ ID NO: 48513 - DNA, 255 bp, Glycine max
  Clone ID: 700966972H1
aacaaattaaattagtggttaaggttgttggaggagctctaacaagagatggagacacaaaattggttcgaaagagtgaagcctttagcagctgtggtatcaatgcagtttggatatgcagctatggatgttctatccaaggctgcaatgaacaaagggatgagcaactatgtgtttgtcgtttatcgtcatgctgttgcattctttgttatggcccctttggcatggttttttgacaagaaagtaaggccaaag

SEQ ID NO: 48514 - DNA, 253 bp, Glycine max
  Clone ID: 700966973H1
gacgccgtagagtcagagagagagattcactgaaacagagcgcagaagaaaatacataaactaatccagaaaatgagcagcggcgctggaaaggtggtgtgtgtcaccggcgcttccggttacattgcttcctggatagtcaaattcctcctcaatcgcggctacaccgttaaggccaccgttcgcgacacaagtgatccgaaaaaaataaaccacttggttggcctcgacggtgctaaggagaggctgcacc

SEQ ID NO: 48515 - DNA, 253 bp, Glycine max
  Clone ID: 700966975H1
ggagaaccttcttttctctctgttttgttgttattcttatttcagacctaaaaaccaaaagcaccgattctgctttctagaattacatcatcgtatcaagaaaaccttggaactacacgaaaatggtgtcggcgaacaaggagatggtcgtgtactgcttcgacaccctcctcgctcactacaacagcacggaagctccttcccctgccttcgatcaggctcaacatccattgtttgttacatggaagaaagt

SEQ ID NO: 48516 - DNA, 254 bp, Glycine max
  Clone ID: 700966977H1
tccggcttcaacatgcacagttacctgaagaagcaagagagcttgacaaggagcatagacagattgtaaaggagaaagaagaatctgttcgcaatcaagactttgagaaggccggagagctaagagataaagaaatggatcttaaggcgcagatatctgcacttatagaaaaaggcaaggagatgagtaaggcagaaagtgaggcaggagatgaaggtcccatggtcactgaagttgacatacaacatattgtc

SEQ ID NO: 48517 - DNA, 253 bp, Glycine max
  Clone ID: 700966978H1
tatgcttccgtcatatctctgcttacactctgtcctccgtttgtcatacttctatggtacaccatgactcttgctgacggatctgtttccgagacattccattatttaaggcagaatgggttgcagggtttgctacatatatggcccacccccactcccaccgcctgcaaaatcattgcagtctatgctgcatttgaggcagcacttcagcttcttcttcccgggaaaaccgtttacggccctatttctccaa

SEQ ID NO: 48518 - DNA, 253 bp, Glycine max; identical to SEQ ID NO: 20364
  Clone ID: 700966980H1

SEQ ID NO: 48519 - DNA, 252 bp, Glycine max
  Clone ID: 700966984H1
ctttttctctctgtctctctctctcgctctcgctcttcttctcatcaagcacagagttacagactcaccgatcttccgattctctttcgtcttggtttatgagctcgaaggagagacccactcttggtggcacgcggattaagacccgcaaacgaaatattgctgcgccgctggaccctgcagcattctcggatgcagtggtccagatttatttggataatgctggtgatctggaacttattgctaagagta

SEQ ID NO: 48520 - DNA, 132 bp, Glycine max
  Clone ID: 700966986H1
gtgttttacaggttagaattgctagaatctttaacacctacgggcctagaatgtgcttagatgatggccgtgttgttagtaacttcgttgctcaggcactacggaaggagcctttgaccgtttatggagatg

SEQ ID NO: 48521 - DNA, 251 bp, Glycine max
  Clone ID: 700966988H1
gttgaggtttccaatgactgttcctatggggactgctttggttgacatgtatttaaagtgtggttgcgttgaaaaagctaggatcttgtttgatgggatggcaaagaaggatgtgtggatatggaatgtcatgatttgtgggctggcttcacatgatcatgccaaggaggcactcgcgctgtttcagaggttcgttggtgaaggttttcagcccgtgaatgtgacgtttgtgggtgtgcttaatgcttgta

SEQ ID NO: 48522 - DNA, 260 bp, Glycine max
  Clone ID: 700966950H1
tgttaactggcgtgatgctcttgctgtggtagcagaggttgcccaccaagtcaaaccggaagaaattgttggcatagctggcaaactttctgatgctgagtccatgattgcactaaaagatttcataaataggatggggtcaaatgatgtatggggtgaaggcattggtgtaaatactaatgctgatttcagatcaggatatattatgaatactagcattgctggtcttgaaaaagcggatgcgttcctgttggttggca

SEQ ID NO: 48523 - DNA, 264 bp, Glycine max
  Clone ID: 700966916H1
cacaaaatcaagcacacaagcagattcacttctctgttctgacacacatattaagttcccgagaaagatctagagagtaattaagatgggtacgtggttcacaaatgcaaggccgtatctgctgttagtggcagttcaatttgggtctgctggcatgttcatatttgcgatggatgctataaagaagggtatgagccattacgtgttcatcgtctatcgtaatgccatcgcctctgtatctcttgctcccttcgcatttgttct

SEQ ID NO: 48524 - DNA, 266 bp, Glycine max
  Clone ID: 700966917H1
tttcactaccacgcccactgttagatcttctcctttctcacctcttccaacaatacatcttctgcctactgctaggtgaaatgcagaatccagatgcaaatcaacttcccgaagttgattcgttgccagatgggtttgttgagagtactacagagcctcttgctcctgcaactccatctcctgaacaagagaaacccctgaatagttacaaggatgatggtccctctgaccttattcattctaatgaacgatcaaatgatttggga

SEQ ID NO: 48525 - DNA, 263 bp, Glycine max
  Clone ID: 700966918H1
ggcattttgggcatcgcttgggccttcggtggcatgatcttcatccttgtttactgcactgccggaatctctgggggacacatcaaccctgcggtgacattcgggttgttccttggacgcaaggtgtctttggtgagggcgttgttgtacatgatagcacagtgtgccggtgcaatctgcggtgctgggttggccaaagggttccagaaatcgttctacaacaggtacggaggtggggttaacactgtcagcgatggctacaa

SEQ ID NO: 48526 - DNA, 263 bp, Glycine max
  Clone ID: 700966919H1
tcccaatttcgcgataccaaaacctcagcaatcaacaatgtcgtttttctcaaggggccgtcgcgacgacgacacggtggacgactacgacgagtacgaccccaccccttacggcggcggctacgacatcgccctcacctacggccgccccatcccaccctccgatgagacctgctaccctctaggagcctcttcttctgatgacaacttcgattatgatcgccctcaatacacctctaacgctgaaccctctgcttatggtg

SEQ ID NO: 48527 - DNA, 263 bp, Glycine max
  Clone ID: 700966920H1
gcctgaaaaggggtctcctgaatatgatgcgttggctaagaaccctgagaaggagtttttgaagactattactggcaagaaggagaccctcattgaccttacagttatagaaatcttgtcaaggcacgcatctgatgagttctaccttgggcagagagatggtggtgactactggacttctgatgccggtccattagaggcatttaagaggtttggaaagaagcttgaagagattgaaaagaagcttatagagaagaacaaag

SEQ ID NO: 48528 - DNA, 259 bp, Glycine max
  Clone ID: 700966921H1
gtgttgatcactttggttttgaggattgtctaaatgacccccgtgagtcagagactttccggccattagacatgcatcatgggatggaagttcgccttggtctatctaagggaccagtgtacccaagtattatataattaaatttgactgttattctagtaccagaaaacagtattttgtgatcgaagcttcttgttattcattaaaatggaagtgtccgaggattctccatatgtagtcgtggacttgtgttttccta

SEQ ID NO: 48529 - DNA, 260 bp, Glycine max
  Clone ID: 700966922H1
tctcatggcatcttcttctggtagtttagacacctctgcaagtgcaaactccttcaccaacttcaccttctccacacaccctttcatgtccacttctttctctgaccttcttgcttctcccacagacaacaacaaaccaccacatggtggtggtggtggtttgtctgagagaactggctctggtgtccccaaattcaagtccacaccaccaccttctctgcctctctctccccctcccatttctccttcttcctactttt

SEQ ID NO: 48530 - DNA, 256 bp, Glycine max
  Clone ID: 700966923H1
ggtttctttaacaagggactggtccctgggctttgttttggtgcgggtcttggaattactgtctttgggatggcctacatgtttgtacacgatggattggttcacaagagattcccggtgggccccatagccaacgtgccctatctcagaagggtggcctctgctcaccaacttcaccattcggaaaaattcgatggagtgccttatgggctgtttatgggaccaaaggaagttgaagaggtgggggggctagaag

SEQ ID NO: 48531 - DNA, 82 bp, Glycine max
  Clone ID: 700966926H1
cgttcatgtggctatgttagatgcttacttttatattaaattagactgcatgttatggtaaatgtatctttgtttcttcagt

SEQ ID NO: 48532 - DNA, 262 bp, Glycine max
  Clone ID: 700966927H1
cacatttttccttcactcactcccatcacaataatttcttccctccttccttcccacaatggtcatggaagaatctaaccctttagacaatgaagttcaaccaaccacttcatcatcctctttcaccattactactccctctacctcctcttcctcctccatagaagaagccactaacactactactaaggagaaaaagaagaagagagccattagtaatattgaagggaagcaccctacgtatagaggagtacgtatgcgt

SEQ ID NO: 48533 - DNA, 260 bp, Glycine max
  Clone ID: 700966929H1
ctcactcgttcattccaacctacccttattcttcttcttcaattccacacccatcatggcacgttttccgatcctctttctcctcgccaccctcatcaccctcgcctccggtgcccgccacgatattctccggttaccctccgaagcatccacttttttcaaagcacccggtggcgatcaaaacgatgagggcacgaggtgggccgttttaattgccggttccaatggctactggaattacaggcaccagtctgatgttt

SEQ ID NO: 48534 - DNA, 259 bp, Glycine max
  Clone ID: 700966930H1
gctaacccacagtccctccctcacccacgtctctccccgcttcagatcttaaacgtctttcgctgttccaagatgggtgtggctgagaacattcccgatatggaggagggtaccttggagattggaatggaatacagaactgtatctggagttgctggaccattggtcattcttgacaaagttaagggacccaaatttcaagagattgttaatattcgtttaggagatggaactactcggcgtggacaagttctagagg

SEQ ID NO: 48535 - DNA, 277 bp, Glycine max
  Clone ID: 700966932H1
gtttcacacacacagcagagtaaaaagagagagaagagaaacacacaaacacaaacagaagcatggaagtggaagtgatggttccaccggtggacttcaacttcgacagcaactgctcctcccccttcatcaccgccccttccagcccccaattcttcgcttccaacaaaccaaacttcttcttcagcgcccccaccagccccacacgtggcacctcctccttcttccacgactccccctcctcttcctctgttcttccccatgaagaacaacaaga

SEQ ID NO: 48536 - DNA, 165 bp, Glycine max
  Clone ID: 700966934H1
actttccccaaacaatggttggtttttgggtgcaatcaatgattggcacttctaattgctacaattttttcttcttttatttatttgtttatggatgattgttcaatgtagcgttttgttttacctgtattgtaagatttacacgatataacgttctcgttacaa

SEQ ID NO: 48537 - DNA, 260 bp, Glycine max
  Clone ID: 700966935H1
gaaactatcaatcttgaaccagcattgaataacaacagcatcactgttgttccacagcaaccagtgccacaagcaacaccaacatcaactccaacaccacaacaagcacaaacaacaacagttcctgaggccccacaagtacagccattggtcccacaactacaacaacaacaacaaatagtggtgagtaatgtggaaatcaacaaagctgataataacggtgagaatttgatgatggaagcaagctcttcaaggtggcc

SEQ ID NO: 48538 - DNA, 260 bp, Glycine max
  Clone ID: 700966936H1
aatcaatcttctgagagcgtttggttgaaagtagcaaagatgtttcctttcgggcaaaagggtcaaaagataaaggggactatggtggttatgcagaagaatgtgttggatatcaacagcatcaccagtgttggagggatcgttgaccaagtcttaggcttcataggcagtgcagtcgatgcacttacttttgcagccaccaaaatctccatccagttgattagtgctaccaaggctgatggtgggaaaggaaaaattgg

SEQ ID NO: 48539 - DNA, 258 bp, Glycine max
  Clone ID: 700966937H1
ggttggcggattaaccctaatttgtacgaagaagggaaggtttgccttagccttctaaatacatggacaggcagaggaaatgaagtatgggatcctaaatcttctagcatccttcaggtcctagtttcactgcaaggcttagtactcaactctaagccttacttcaatgaagctgggtatgataagcaggttggaacagccgaaggagagaaaaattcattgtcatacaatgagaatacctttttacttaactgcaag

SEQ ID NO: 48540 - DNA, 150 bp, Glycine max
  Clone ID: 700966939H1
ttctcatatcctcaatcaccccccctcgcactcgctcttcccttcctctggtggcgacaatgtcgactcctgctaggcagaggctgatgagagacttcaagacgctgcaacatgacccgcctgcagggatcagtggtgccccccaggata

SEQ ID NO: 48541 - DNA, 257 bp, Glycine max
  Clone ID: 700966940H1
caaacgtttcagggaagtcgctgataagtgcggacattgcttctctgcgacatggcgcacactagctgccttctggcgcgcaagaagtgaacagctccttcaagtattccgacattatgaccaccacgactcacaatagcttacggtgcccacgtgcggggatgatcttttaccggaatggccccaagccgccgtagaaggggcagccggagaacgcggtttatgatttcgaggacaagattaacttcgcggtgttc

SEQ ID NO: 48542 - DNA, 258 bp, Glycine max; identical to SEQ ID NO: 39481
  Clone ID: 700966941H1

SEQ ID NO: 48543 - DNA, 258 bp, Glycine max
  Clone ID: 700966943H1
tacaaagagggttagaacaacttaacacagatgggtcaaaatcaaaacatgttgttcagctttccattttcgtagtgggattcttctcttcttgctttctccagtgtcatgaagaagagttcttcatcatcattccagaacttgggatctttcccaagtccagggggaccctattatagggagagaaacattaggagccaaaagggttggtgctcagagagagtttcaaattcaaagctttcaactagtgctagtagc

SEQ ID NO: 48544 - DNA, 258 bp, Glycine max
  Clone ID: 700966946H1
gccagctagggcttgagatctcatatatcatggctacctccatggtgaagcttatgcttttctctgctctcagactcttgtccttgcaagcagttgtgtctgtaacaccactgcattttcaacatccactagaccctttaaccaaacaagagataagtcttgtccaaaccatagtccaaaacaagtacccaagctcaagtaacaggttgagcttccactacattggactcgacgaacctgaaaaggatgccatcctca

SEQ ID NO: 48545 - DNA, 256 bp, Glycine max
  Clone ID: 700966947H1
gaatgtttcccttgtttgtgtgaactaccttctagctaggctttccattctttccattgatctatctttctactttttggttgtcttcaacatgttttgtaccttaaattgagtctaggtccctatctcttgcttcatatgtatatttcaatagggtgtcatcgttgagaaatttcatctgtgggaagcctataacatgttgctaatataatttaagcacttgttggcaaacttgtaaatgatttcatagttttct

SEQ ID NO: 48546 - DNA, 256 bp, Glycine max
  Clone ID: 700966948H1
ctcagcttttgttctcgcacttcgctgtctgaggttctggattctcagtgtttgcgaacgctgcatcatccttatgggaagaatggatcatcaagggcatagccagaacccatctatgggggtggttggtagtggagctcaattagcatatggttctaacccatatcagccaggccaaataactgggccaccggggtctgttgtgacatcagttggtaccattcaatccacacctgctggagctcagctaggacag

SEQ ID NO: 48547 - DNA, 263 bp, Glycine max
  Clone ID: 700966949H1
gtcaacttccggcgccggcaggtacatggcttttccgccgtctccgtccgcgcctccgtcgccgcacctctccggtcttcgctccactcccctctccgacccggacaaatatctagctgagttgttgggagaacgtaacaagcttagtcccttcatggctgtgcttcctcactgctttcgattgtttaaccaagaaattttgcgtgtaaccacgctgatggggaatgcatcagttttaggtcaaagtgggcttgaacacgcta

SEQ ID NO: 48548 - DNA, 263 bp, Glycine max
  Clone ID: 700966915H1
gttcgttcgctcttaccttcttcaccttccttcctctctctctctagagaatggaaccggaatccggaacttcgacttctcggaatccttctcagttgtcttgggtgaatctgtctaggaatttattattagcgtatcaaagctttggtgtggtgtatggagatctgagcacttctcctctctatgtcttcacaagcaccttcaaggggaagttgcagaatcaccatgacgaggaaactatattcggcacgttttcgttgatt

SEQ ID NO: 48549 - DNA, 269 bp, Glycine max
  Clone ID: 700966901H1
attcccttgtgttgtgcctccaaaagtcacgtgcgacgacacgtcgtcacgtgtcgacaccgtgttgggcctttgtgtgtcgtttatgtataagaatgcgtgtgggtttgggtgttaaggtatcgttgggtgtgatcggtgtgagtctaatatttgcagtgctgaaaatgtcgcagttgttggacaaagccaaaaactatgttgcggagaaagtcacgaacatgcccaagcccgaggcgagtgtcaccgacgtggatttcaagcgcgtg

SEQ ID NO: 48550 - DNA, 275 bp, Glycine max
  Clone ID: 700966903H1
ggctcgagctcgagccgcaaaaatggatgattctggaagtaaaactaaactgttgaatccatggatgctccacttccagaaactcgctctcgaactcaagtgccctctctgtttgagtttgttcaagaggccggtgttacttccatgcaaccacttgttctgcaattcatgtttggctgattgcataacggctgggcctggatgtgctgtttgtaaggcaacgtatgctcaaacagatgttaggcatgtgccttttgtggaaaacgtggtggcaa

SEQ ID NO: 48551 - DNA, 264 bp, Glycine max
  Clone ID: 700966904H1
gcagtatgagtttaagatcacatcttgcttccatgaaaacttgcccctaatactgacaagggttgtccttgggatagccttacaagtcgtatgcagttacatcacattccctctctattccctagtaacacagatgggatctcacatgaagaaaacaatctttgaggagcaaactgcaaaggcacttaagaaatggcaaaaggctgcaaaggacaagagaaagttaaggaaagcaggaatagatattccttcagggactatgag

SEQ ID NO: 48552 - DNA, 262 bp, Glycine max
  Clone ID: 700966905H1
caaccttgactggtacaagggaccaactctccttgaggctcttgaccaaatcaatgagcccaagaggccctccgacaagcctctaaggcttccattgcaggatgtctacaagattggtggtattggtactgtgccagtgggacgtgtagagactggggttgtgaagcctggtatggtggtgacttttggtcccactgggctgacaactgaggttaagtctgttgagatgcaccatgaggctctcacagaggctcttccaggt

SEQ ID NO: 48553 - DNA, 263 bp, Glycine max
  Clone ID: 700966906H1
attcaggacaaagagggtatcccaccagaccaacagaggctcatctttgctggaaagcagctagaagatggccgaaccttggctgattacaacatccaaaaagaatctaccctccacttggttctccgccttcgtggtgggatgcaaatctttgtcaagactctcactggaaagaccatcacccttgaggtggagagctctgacactattgacaatgtcaaagccaagattcaggacaaagaaggtatcccaccagaccaaca

SEQ ID NO: 48554 - DNA, 261 bp, Glycine max
  Clone ID: 700966910H1
gaatcatatacacatatattaaactgaacgaagttgtcctagaagagaagaaccaatggctgctggcgtgggtttccgcagtcacaaatctttgttaataattcttttgggttttcttggcttgttctcctttacagttgaagcagacacaaagaaataccaatttgatattcaagtaaagaatgtgagtagactatgtcatgcaaaacccattgtaacagtaaatgggaggttcccagggccaacgatttatgtgagaga

SEQ ID NO: 48555 - DNA, 133 bp, Glycine max
  Clone ID: 700966911H1
ttttagtctcctgctactgcatctatctctcactttcagaatagcatgggatttggtataacaccatcacatagaagtacaaaagcgatgtgcagctgattccattgtgtagaagagagcagagagctataag

SEQ ID NO: 48556 - DNA, 265 bp, Glycine max
  Clone ID: 700966912H1
gagaaagacagacgaagatgaagaagaagaagaagaagaagggtagagaaagtgaaaaagagtttgggggagatcttgtaaataaggaaaccctagtttttccttttattgggttatttttccttgattttcccattaatttttcagctccaacctgctactgttaccaataaggcatctcttgtcattgcttcaatcgaacaagagtgaacgagttttgtgggattgtgtattgttagaaagccgcaaagatgatgtccaggtc

SEQ ID NO: 48557 - DNA, 280 bp, Glycine max
  Clone ID: 701037103H1
tttttgaaataaatgaggcatttgcctcccagttcgtgtattgccgtaacaagctagggcttgatccagaaaagatcaatgttaatggaggtgcaatggcaattgggcatcctctgggttcaacaggtgctcgatgtgttgcaactctgttgcatgaaatgaagaaacgtggcagggactgtcgatttggagttatatctatgtgcataggtactggaatgggggcagctgctgtttttgagagtggtgattgtgctgatgagctatgcaatgcccggaa

SEQ ID NO: 48558 - DNA, 284 bp, Glycine max
  Clone ID: 701037316H1
cgcagcagacgatgatggtttgatgagtgttaaggaagaacattttaacaatggtttcaaatctatgccatagttcttatctccctataaataccaaatcccaatttctttctctccatccacacactttcctttctcgcacccatctaagattacccaataagacgcaactctcaatttctgacatttcttcaatcgagtgtctccagtggtatcatccaagaggaacgtatgggaagataaagagatgacgataaaacctgttgttcgtgtttggaggggaa

SEQ ID NO: 48559 - DNA, 286 bp, Glycine max
  Clone ID: 701037317H1
catggctgcagatgggaacaacaacgatgtacccttacacaaattcaaagacagcaatccaaaccctggagagttcgatgcaaagggttacagcctcagcggaaaaatcatgctttcagcaataatccttcttttcttcgtcgtcgttttgatgttgtgccttcatatctacgcgcgctggtacctccggcgtgctcgccgccgccagctccggcgccaacgcgagctccgccgcacccagcttgtcttttacaacgacgacgccacccccgcagccgtgtcagtg

SEQ ID NO: 48560 - DNA, 281 bp, Glycine max
  Clone ID: 701037331H1
cctgctattcttcttcatcactcttctgttctcttttctcccctataataatatttccaacacaacaacactcagcagacaagtagccagaacaagaaaatcctttgacacattgatcacttcctttaaggaaacaaacatggaaaggggtcacatggggtggttcctctactgttgttgtttttctctacttttgtttcattcttctaggtcacccagaagagacttgcccatcatagcctttgaggatggctacacccccttgtttggggacataattt

SEQ ID NO: 48561 - DNA, 157 bp, Glycine max
  Clone ID: 701037402H1
cgaaagcacaaatcttgaatttctggagatcagctcttgttctcagttgcttagtatgaatccatctattttgtctctcaagaagctcgagagattgtcttctcatcactgttcccttaacacgctcataagcgataatcatttaacctcccttaaa

SEQ ID NO: 48562 - DNA, 151 bp, Glycine max
  Clone ID: 701037502H1
gttctctcatttctcgtcttcactgagaaaaatccttctttgtgcatgctcctcgtttccatctaaaggggagagcgggtgagtgagaaaaagagagtgaggtttctagcttctactgttgagtaaacatgactatggaagagggcagggt

SEQ ID NO: 48563 - DNA, 258 bp, Glycine max
  Clone ID: 701037573H1
tcgagctggtgatgtttatctgccaattgctagtgtgaaaggagacattcagatctggggaggaaagggtaagggccagggtggctctggagcaaatggaactataactgggaaggcttgccccaaagggttgtacggtaccttttgtgaggaatgtccagctgggacttacaaaaatgttactggatctgataaatcactttgtcacagttgtcctgtcaatgagcttcctcaccgtgctgcttatatttcagtccg

SEQ ID NO: 48564 - DNA, 136 bp, Glycine max
  Clone ID: 701037577H1
actgagcgaatcggctcgagttacaacgcaacaacataacgttgctaattgcttgcactacctcttatggttgcttcctctgtttctcattagctgttttggtttttgtcttagttctacacctttcctcatttcc

SEQ ID NO: 48565 - DNA, 117 bp, Glycine max
  Clone ID: 701037603H1
tggaagccatttacaatacaaagtccaatttgattaggtgaatacagaggatgacacagaggtaattcctattttaatagatgcacacatttcggctcttgtttggaattatctatt

SEQ ID NO: 48566 - DNA, 80 bp, Glycine max
  Clone ID: 701037615H1
ctcagtcgcttcaaatttcaggaaatcaattatggctcaaccctcaacaagaataggccttgctggactggctgttatgg

SEQ ID NO: 48567 - DNA, 71 bp, Glycine max
  Clone ID: 701037620H1
cagggtagatatgcgcatgctgctgtaaggagccgagctttagcccggtcatttcattcaatccgtcatgt

SEQ ID NO: 48568 - DNA, 108 bp, Glycine max
  Clone ID: 701037686H1
ctgattacaattgctcttccagcatcaaactcgaggataacaagactggaactgtatatacaaggcgtgcacaggatcttgcttcagcttctactgtgctaattggaa

SEQ ID NO: 48569 - DNA, 142 bp, Glycine max
  Clone ID: 701037911H1
gttatggcctaaggcctcttgtttgagtgttcaccaaaaaattcaagttactgtgatttgacatgtacacagggctttctgaacggatatttagtttgttaaattatggttgcccccatatttatttttcatagctggtgaa

SEQ ID NO: 48570 - DNA, 97 bp, Glycine max
  Clone ID: 701037948H1
atttaagactagctctaagacgaagaccaatacgatggttgtgtgcttgcttgttgccatcttggctctgacatcctctgttgtctctgcctatgac

SEQ ID NO: 48571 - DNA, 83 bp, Glycine max
  Clone ID: 701038040H1
tggcgtgagtgaccattgtggaagaacgactgaaggtgttcgcgatcggagactttgaaaccctcctttcactcattcatccc

SEQ ID NO: 48572 - DNA, 284 bp, Glycine max
  Clone ID: 701038103H1
tgaactcgattggaaaaagattgtggaacctgtcatgcagttgtatacagaggcaactgatggatctaatattgaaactaaggaaagtgctttcgtctggcatcatcaagatgcagaccctgattttggctcatgccaagccaaagaattgttaaatcatctggaaagtgtccttgctaatgaacctgcagttgttatcaggggccagcatattgttgaagtcaagccacagggattaaacaagggattggtggctgaaaaggttctttccactatggttaatg

SEQ ID NO: 48573 - DNA, 290 bp, Glycine max
  unsure (1)..(290): unsure at all n locations
  Clone ID: 701038117H1
ggaaagggtgggaagggtttaggaaagggaggagcaaagaggcatcgcaaggtgctccgcgacaatatccagggaatcacgaagcccgcgattcggagactggcgagaagaggtggcgtgaagagaatcagtggtttgatctacgaagagaccaggggcgtgctcaagatctttctccagaacgtgagccacgatgncgtgangtaaacggagcaagctaggagaaagacagtgacggccatggatgtcgtttacgctctcaagaggcagggaaggactctctatggttt

SEQ ID NO: 48574 - DNA, 297 bp, Glycine max
  Clone ID: 701038118H1
tgcatttctatttctaactaattattgtgcttatcattattgttgacacagacaagaatggcaaagttaataaaattctttgagttgaacacaggggccaagattccttctgttgggttaggcacttggcaagctgagcctggtgttgtagccaaagctgtcaccacagccattctggttggatacaggcatattgattgtgctcaagcgtataacaatcaagcagagattggttctgctcttaagaagctttttgatgatggtgtggtgaagcgtgaggacctatggatcacctcc

SEQ ID NO: 48575 - DNA, 267 bp, Glycine max
  Clone ID: 701038246H1
ctctgagagtgaatatggtgtgctggattgcactggtgctgccaacagtggaaatggtattgtttgcagaagatgatttctttttttatgtcactaatgtgctcctattaagattgattcggagtttctaattctgatttagtttgatgattgttttctgtttaattgtgtcctaaaccaaagtgtcctgttgaataaaaagtgaaatattttaatttgttcgattcataaacgaacaaatgggtgagattatataccaggttctct

SEQ ID NO: 48576 - DNA, 147 bp, Glycine max
  Clone ID: 701038304H1
tcgaaatgtccagtgttctcaggaagatgagggctggtggtgctggagacaagaagaaataagtcatatttactgttttccagattcactagatggacctgtgtactgatggacgagctttcatatttttgctttggttccattagt

SEQ ID NO: 48577 - DNA, 123 bp, Glycine max
  Clone ID: 701038373H1
tgtcaaaatcggcaccaattaatttggcgggagacaaattggaggacattctgagtgcctatgaatttgtagagaacccagttaattcctgctttttgggggaaataaggtttaaggcggttc

SEQ ID NO: 48578 - DNA, 117 bp, Glycine max
  Clone ID: 701038410H1
tctgtgcatggccttgagttggcattggatgagatctcttatgatttggctatatcaagtggaaggatgactaaacctgatcctcatggtaacacatgttgcatgctacctggagca

SEQ ID NO: 48579 - DNA, 197 bp, Glycine max
  Clone ID: 701038411H1
ctctcattaggtattccctcctaaaaaacaccaaaccctctcaaaccttaatttacccaaaatgataaaacactctcttttagtcttacccatctcattaacacttgtaatttctctcttgcattcaaccactttagcagcgatagctccggccaccgcaccggcacaagctccccccactactccagcggcctccg

SEQ ID NO: 48580 - DNA, 248 bp, Glycine max
  Clone ID: 701038430H1
caagtgtcacaagtcataactcgttagagagagtttgtgtgtgtttttgtgtgtcaccttggtgcatacaacacaagatggaggaccaaaatggtagtggtaagttgagccaagggcttcgcaaggtgaagccttaccttgctatattgtcccttcagtttggctactcagggatgtatatcatcactatggtttctttcaagcatggcatgagtcattggatactctcagtgtaccgtcatgtagtt

SEQ ID NO: 48581 - DNA, 129 bp, Glycine max
  Clone ID: 701038496H1
cgtcggaattcggctcgagatatagcataagagaaccctaagccacttcagattctactggcacgaagtcttcagcggagaaaaccccacatcggttagaatcattctcgcactccccaaatacaacac

SEQ ID NO: 48582 - DNA, 277 bp, Glycine max
  Clone ID: 701038563H1
agcgcaccggaagcgcccacggttgggatatcatcttttacattttcagcttcctcaagggcatctcgctcttcactctcattgtcttgattggcactggctggtccttcctcaaacccttccttcaggataaggaaaaaaaggttctcatcgttgtcatcccccttcaagtcattgccaacattgctcaggtcgttattgacgagaatgggccctacggccatgactgggctacctggaaacaggtcttcctccttgttgatgtcgtctgttgctg

SEQ ID NO: 48583 - DNA, 123 bp, Glycine max
  Clone ID: 701038644H1
ctaaaacgtccacacattctccgtcgccacaacaacaatggctccgaagaaaggtgtaaaaggttccgttgtagcagcgaagaagaaggttcaggagaaggtgacgaatcctttgttcgagaa

SEQ ID NO: 48584 - DNA, 199 bp, Glycine max
  Clone ID: 701038846H1
tccactctctctctcttcctctctctctcttcggagctcaatttcgccgtcaatggcggcctccaatgctcacaacggcaccaccaccaactccatcaggcacgccttcggcaatgtcctcgcgttcttcatccttctcctcatcggcgttctggccttctcgatccgtctcttctccgttataaagtatgagagtgtt

SEQ ID NO: 48585 - DNA, 267 bp, Glycine max
  Clone ID: 701038947H1
tcatcgccaaggaacatgaacggtgcagtgagacaggggctgacatctggtgcggcgggggtgcaccaccatcgccactactccgataacttcctcgacggctcttccaacggcaatcggtggctccaatcggccggccttcaacaccttcaatcctcctccaaccaacttcctccgcttcaggactataacttgtacggaggtgcacagggaggaagagtaccggaatgcgccgaggagctttaacggaggaaatgagttttatat

SEQ ID NO: 48586 - DNA, 268 bp, Glycine max
  Clone ID: 701039132H1
cagaagagagcattacaagaagactatggagcaaaggttcaaagaaatggtgaccagcaaaggtcttgagtcagttcagtcagaaatcaatgacttggactgggaaagcacctttttcctgcgccatcttccactctccaacgtttcagacaacgcagatcttgatcaagattacaggaagacaatgaagaaatttgctctggaactggagaaacttgcagagcagcttctagacttgccatgcgagaatctgggcctggagaaaggg

SEQ ID NO: 48587 - DNA, 281 bp, Glycine max
  Clone ID: 701039202H1
caagggtccaaattttgggacaaaagtgagcaactaccctccttgtctcacccctgatctgatcaagggactaagagctcacactgatgctggtggcataattctactcttccaagatgacaaggtgagtggcttgcagctcctcaaggataccagtggatcgatgtcccaccaatgcgtcactccattgtaatcaaccttggtgaccaacttgaggtcataaccaatggcaagtacaagagtgtgatgcaccgagtgattgctcaaaccgatggtaccag

SEQ ID NO: 48588 - DNA, 123 bp, Glycine max
  Clone ID: 701039381H1
gtaatctcttttttcagtgtgtagcatctcaccctgatacaaggctgctattcctcaatgctcagatacctctatatctgtatcccttccttaatagaacaagcaagtcaagaccatttgagt

SEQ ID NO: 48589 - DNA, 291 bp, Glycine max
  Clone ID: 701039403H1
gccatggctttctccttctccaaagcacttgtccttgcctgctccttctgcttatttgcgtctttggcttttggacgcgatttctccattgtgggctattcatcggaggacttaaagtccatggataagctcattgaactctttgaatcatggatgtcaaaacatggcaagatttaccaaagcattgaggagaagcttcttaggttcgagattttcaaggataacctaaagcacattgatgagagaaacaaggtggtcagcaactactggcttggcttgaatgagtttgct

SEQ ID NO: 48590 - DNA, 283 bp, Glycine max
  Clone ID: 701039614H1
tttctccagaacagcaagggagaatcaattcctcatcgttgcaatttttctttcactctctagattctcatctttcctctcttctaccccttcagaaaaaaccatgtcttcatattatatgtatatctagctcttcattttttcttgctcaagattatgctgtaaaattctgaaactcacagtttcagccacattttagacttaaagatctgcgcgttgacccttggcaggttcagcttttggatttgttcatcctcataagcctttgattagtccagttttt

SEQ ID NO: 48591 - DNA, 169 bp, Glycine max
  Clone ID: 701039663H1
ttcggctcgctcgtctacctcgttggcatggtagtcctcgtcatactcttagtgtctttggtcgcttttgtatacatggatactcttcggggacacggcaacattggggccaactgcgcttacttggagtaccgcatggatgacttttctggctatcttcgtcgtaggg

SEQ ID NO: 48592 - DNA, 253 bp, Glycine max
  Clone ID: 701039664H1
tacgacttgttaagccaataatcatggatagaattaagtccaagagtgagatgtctctttgcgagaaatccgatgcaggttgtagtaaatgtcattaggttttcctctttctctattgctcagaagactcttggagctaccagtacaacaaaggctggtccagggtctgatatggaccctgatgaggaaccactggttgctgttcctgatcagttcccagcagcaagcaaaaggtcacaacagccacagagcc

SEQ ID NO: 48593 - DNA, 107 bp, Glycine max
  Clone ID: 701039724H1
catctcgagccgattcggctcgaggtttatctagtctctctgcgtggatctgcagaagtggaagaacgcaggaaggtgcagtggtactttgtcgctgagctcctcac

SEQ ID NO: 48594 - DNA, 99 bp, Glycine max
  Clone ID: 701039809H1
agacaacacgctcggtcttcttctccaatggcgatttccgatgagcctgaaagtgtagacactgctctacaacgactcttccctgcgccgccgtccctc

SEQ ID NO: 48595 - DNA, 272 bp, Glycine max
  Clone ID: 701039826H1
tttttccttcaagtcactaagataatggcaagcatttataacattccatcacacataaaagctcgggtctattatgaatatggaaacatagaagagattctcaaatttgaatctaacatacccataccagacatcaaggaaaccaagtgctcatcaaggttgtggctgcagcgcttaatcctgcagattatatgagggctcttgggtttttcaaggacactgatgcacccttacctattgttccagggtttgatgctgctggtgtggtggtg

SEQ ID NO: 48596 - DNA, 83 bp, Glycine max
  Clone ID: 701039896H1
acgaaatcgcgcacagaagagcaacgttaacaatgggttctcgctacgaggtggaactgaagtcctcatcggcacgcgctctc

SEQ ID NO: 48597 - DNA, 254 bp, Glycine max
  Clone ID: 701040004H1
cttattatatgatggttaagtctttggttgtattatggagggtatacctacgtgtgaccagaacacttggctcaacatcagcgtgcttaccacgtggtgacatgagaacttctaggagttgtgtattgaagtgagcaagctgctgctggtgctggagtttagggatgagggtttattttattggcagggttacatgagtttgtgatgatgtgttactgtgtttactttaggtttgaataaatgatatttacttt

SEQ ID NO: 48598 - DNA, 222 bp, Glycine max
  Clone ID: 701040012H1
gcgaagaagagagtgaaagagaatatccgagactctgattctgagagtcgagacgagtgagtgagtgtagttcgtcttctgaatcagatcattcatcactctctggttctgatttttctgacaccaaaatggtgaatcctcgaattccacgttcaaggatctccactttcacacttttcacttgtcagatctccatcgttctgtgcatttgattcgagatgc

SEQ ID NO: 48599 - DNA, 276 bp, Glycine max
  Clone ID: 701040033H1
ctcatacactgatcatgggactggatttaagacaagtggtggcaggtgtcctcaccctcaaaatggtcgtcacgctgatacacatgatcaaaagagaccattttgatgctgttgatgataaacttcctggaacggaggatgtcagctcttgaaagtacaaactttgatactactcatgttagaaagaacatcgggatttggaagggcgatggtaatgagttaaaaccaggttggcttaagccatctgaagataacgtggatcacactgaggagtga

SEQ ID NO: 48600 - DNA, 270 bp, Glycine max
  Clone ID: 701040044H1
gttgccgattctagttacgacatgattagtggtttagaccaggaaattaaggaaataaaagagggcattgaatttaccaatccaacatcctgagctgtttggaagtcttggaattgcacaaccaaagggtgtcctggtctatgggccacctggtacaggaacaacattgttggctaggggagtgcgtcatcatactgactgtacattcatcagggtgtctggttctgaattagttcagaaatacattggagaaggttctagaatggtcag

SEQ ID NO: 48601 - DNA, 211 bp, Glycine max
  Clone ID: 701040049H1
gagaaagtgcagacagataagcttgaatgtataactcacgatttgtatcctggatttagtacatccgaatgcgcattcgtgagcttgcacggtgggaatgaccgctagtcatgtagcatggctgaggtccttgtgaaggatgaagtcagaaaaggtgttactaataagcctggaattgcagctaggctagtcagaatgcatgttcatgatt

SEQ ID NO: 48602 - DNA, 263 bp, Glycine max
  Clone ID: 701040106H1
cggggactgggaagaattaccttctgtgctgtctattgcgataagtgatggatatgtagtgatgcctggaatgagtttgaagttttctgaggaagattttatggatgggtgtagtagtcaagatggtagcatcattggacacgaatctcactcaaggcggtctaggaagctctcaggaagtcgagcatgggaaagaggtagtgaggcagatcaaggagagggtggctatgatattattttgatgacagagattccatactctg

SEQ ID NO: 48603 - DNA, 262 bp, Glycine max
  Clone ID: 701040135H1
ttgatcatgacatgtcttcatcctccatatcaatgtgctatcagcaaagaagctactctttggttgagatctattaatgcaactctcttctctgatggtcatctccaatcacaaatgttgagcttctcttctccaaagtcagattctttgttgatagataaggcttcctcaaatgccacattgcctttttcttgccaccaattgtctagctacaccagaaatacaggttacaattcaggaagcataagcatgcatggggctt

SEQ ID NO: 48604 - DNA, 298 bp, Glycine max
  Clone ID: 701040219H1
taagctccttagcaccatcacaccctccttaacactattcttcctacttctctttctctccatagagctccaagcgtacaccccagaagacaacttcaccatcagttgcggcaccaccgggatagtcttcgacggccaaaggacatggacgggggacgcagacacaaagtatttatctggtggtcaaggcagcaccgttttaaccgaagcagcaacacaagatccttctgtcaatcaagctccctacaccacagcacggttatcccgttctcagttcaattactccttccccgtttct

SEQ ID NO: 48605 - DNA, 138 bp, Glycine max
  Clone ID: 701040533H1
ttcgttgttgttgttctaaaacgtccacacattctccgtcgccacaacaacaatggctccgaagaaaggtgtgaaaggttccgttgtagcagcgaagaagaaggttcaggagaaggtgacgaatcctttgttcgagaa

SEQ ID NO: 48606 - DNA, 270 bp, Glycine max
  unsure (1)..(270): unsure at all n locations
  Clone ID: 701040607H1
aggaatccattttaaagctctcaacgccatctccagcagcatccttataaaaagcacttcgccccaaaaattctagcttcctctccttcatacacttcttccaacgctattaattacaaaattaacctctccgcttccctccgatccattcactccctccctcttaaaacctccttgcagatcaaatgctcccaaacagatgggaatggaagtacctgcaagaggacagtgcttcatgatctttatgagnaagaagggcagagtccatgg

SEQ ID NO: 48607 - DNA, 201 bp, Glycine max
  Clone ID: 701040847H1
ccggagccctcctcgccggcggcctctactggttcgtgtgcgttctgggccccgccgagcagaagggcaaacgcgccaccgatctttccggcggctccatctccgccgagaaagtccaagacaactacaaacagtactggtccttcttccgccgcccaaaggagatcgagaccgccgacaaagtccccgacttcgtcgaca

SEQ ID NO: 48608 - DNA, 244 bp, Glycine max
  Clone ID: 701040932H1
aattcagaaattatctgatgtgatggctacagatgtgtatgcatggagcactagtcacgtaggaggaatcaccatggactcagtacgggcatcagcattataagtgctgtcttgacaaaggatgtgcttaacctagtagtagtgaatgttgattcccagcatcttctgatgctagagattcagtcgatgatgaggcttagctcatgcattaggtgctactgaattcttcacctggacatatcat

SEQ ID NO: 48609 - DNA, 282 bp, Glycine max
  Clone ID: 701041016H1
aaaataatcacattccggccgttgcttgcagactatcccaaaccaaaaccaatgctcagaatataaagagcaaataacctctgattctccctttattttctgaattgcccctcttaagtctcaaccttctttgtctcctctctctctctttctctccttcctctctggccatgattggaagtaaagatcgttctgctgactttgaaggtgagaactccaggtgcaagctttcaaggcacaattttgaggccaacaaggagtacccagatgacaaaggtgttg

SEQ ID NO: 48610 - DNA, 282 bp, Glycine max
  Clone ID: 701041037H1
tggtgatgaaatggagtatgcggcagacgataatgatatggcagacgtagaagatgatatgtatgaccggggcagagcatttggtgaatcagattcagatgatgacgacgactacgaatatgaccctttggataaccgtatatcagataacactggtgctgaagctaagcgggggaaggatatccaaggtataccttgggataggttgagcattagtcgtgagagatatatacaaactagactagaccagtacaagaatgatgatagcatagcacaatcagg

SEQ ID NO: 48611 - DNA, 267 bp, Glycine max
  Clone ID: 701041073H1
ctcgaaaacaaaacgacgtggccctgagcatctcaaagctcctgatgccgacatgagcacgggacaagaacctcgtgtattcgccgataacgttgcacgtctgaactcagcatcatcgccgctggatccacaaggccccacactcgaacagcttctctccttcgctaccgatccaaatcccccgatcatctcaaatccatcgcctctcagctctacgccgtcgtgctatccgacgccactcccgccggagaggatcgactctccttc

SEQ ID NO: 48612 - DNA, 247 bp, Glycine max
  Clone ID: 701041105H1
gttgacttctttcaacctaacccatcgttcgcacggagccgtggtggttctggctctgtccttttttcctttctctcgttaccagaaccagaagaaccatttgtggccaacatggatttggaccagtggatctccaaggtcaaagagggccagcatcttcttgaagacgagcttcaacttctctgcgaatatgtaaaagagatccttattgaggagtccaatgtgcagcctgtcaatagtccagtga

SEQ ID NO: 48613 - DNA, 265 bp, Glycine max
  Clone ID: 701041611H1
attttcatagggaggtctggggctattggaccactggtagaattattgggaagtggaacccctcggggaaagagagatgtgccactgctttatttaatttgtcaatatttcatgaaaacaagaatcggattgtgcaagctggtgctgtgaggcaccttgtggacttaatggacccagcagctggaatggttgacaaggcggttgccgtcttagcaaatcttgccacaattccagaaggaagaaatgcaattggtgatgaaggtgg

SEQ ID NO: 48614 - DNA, 258 bp, Glycine max
  Clone ID: 701041640H1
tcgagcgtttctctctctcattgtcggtgtacgcagatcttgtgcactccacgctcttggcacctgctcttctgctgttgttcttgcggattggctttgtggggtgtgacaaattgtggtttttctgttgagagtagctgaaaggtgggtttttgtgtggaaatgagggcgcttttgctggtggggtggtggagtgtatgataataataaagggtggtggtttttggttttgaagattgtggctttggaaagggaagg

SEQ ID NO: 48615 - DNA, 263 bp, Glycine max
  Clone ID: 701041680H1
ctcacactcactgcagatctcaatccatggctaccattgttagcatcaaggcccgccagatctttgacagtcgtggcaatccaaccgtcgaggtggatttgacatgctccgatggtacttttgctagagctgctgttccaagtggtgcatccactgggatttatgaggcccttgaattgagagatggaggatctgactaccttggaaagggtgtatcaaaggctgttgacaatgtgaacaccattattgcccctgctttggtt

SEQ ID NO: 48616 - DNA, 280 bp, Glycine max
  Clone ID: 701042081H1
acttcggctcgagcaacatgtcaattctctttcctttccttttcctccttttctcgatctctccgtcggtcatcatcatcagacccaaacaaattctctacgcagatcgaatcaaagctcctccatccaattccgagatgagcactggcgaccttctcagcatcgaacctctcgaacttaagttcttctttgagctcaagaagcagatatcatgctctcttatattgtcaaataagaccgatagctatatagctttcaaggtgaaaacaaccaatcccaa

SEQ ID NO: 48617 - DNA, 108 bp, Glycine max
  Clone ID: 701042084H1
attctccgtcgccacaacaacaatggctccgaagaaaggtgtgaaaggttccgttgtagcagcgaagaagaaggttcaggagaaggtgacgaatcctttgttcgagaa

SEQ ID NO: 48618 - DNA, 142 bp, Glycine max
  Clone ID: 701042202H1
tcggctcgtgccgctccaaagccttcctagtccgagaatcaacagaagagcaatttcccctcatctgagtcgcggaagcaaacaatggccgatcaacttaccgttgaacagatctccgagttcaaggaagccttcagcttgt

SEQ ID NO: 48619 - DNA, 69 bp, Glycine max
  Clone ID: 701042376H1
tggcaagttgactatcccatcaatgtacatttaatacgtggaaaccgtggagctgcagatattggtgca

SEQ ID NO: 48620 - DNA, 197 bp, Glycine max
  Clone ID: 701042936H1
atgctgcgcataactcctcacacacacacacaaaatagtagacaacacatacacatacacatgtcgttgatgagtggaggcaagaaaaaacacagatccatcacacacatgaacaattgatctttgtcctttgtatataatttgattctaatttttggcactaagagagccactcaaggctctgggatgtactatac

SEQ ID NO: 48621 - DNA, 235 bp, Glycine max
  Clone ID: 701043103H1
agagatatcgaggatggctctacccacagctaaggagatcgtgtcgtccaattccgtcgtcgttttcagcaaaacctattgccctttctgcgtcgatgtgaagaagctcttcggtgacctcggtgccaattacaaggccatcgaactcgacactgaatccgatggaaaagagctccaagcagcattagttgagtggacgggccagcgaaccgtgcctaatgtgtttattggtgga

SEQ ID NO: 48622 - DNA, 250 bp, Glycine max
  Clone ID: 701043164H1
gctcgagtacgaactcaaatcaagcaatcaatttcaaatccaaaaatggggagctccacaaccttctgtgcctacttcctcgtgtgtacgatcttgtccgtccacgtggcgcaatcctcatcctccaccctcgacctggacacctttttcctccctctcaaatccggctgccgcggatccgtcgccgagtgcagcctcctcgccggcgacgacgacaccgagtttctgatggcgtcggagagcaacggcg

SEQ ID NO: 48623 - DNA, 257 bp, Glycine max
  Clone ID: 701043181H1
gaaactcaaagatgtggaaataagcattccaatagtatatgggaacgtagcattttggcttggcaaaaaggcaagcgagtgtcagtcgcatcagtggacagtcgaggttcgaggcgcgagcagacgagatgctgaatcgcaatcctcagcaggagaatcaccaccatgaacatgaacatgatcatgctcttaagccccctgttccttctcgtatgtccagactgccgcactctgcgtctacaggagacaagctacgg

SEQ ID NO: 48624 - DNA, 241 bp, Glycine max
  Clone ID: 701043248H1
tcaattcccaattttcgaatctaccctttctctctctacgatggagccttcctcgatctctccaccgccagctcccctgccaccgccgtccccttccccgccgaacccaacgaccaccttccaccacccattcccgatccaccttctaaccacccaccttacgccgagatgatatacacggcaatcgaggcgctgaaggagaaagacggttctagcaagagggcaatagcgaagtatattg

SEQ ID NO: 48625 - DNA, 250 bp, Glycine max
  Clone ID: 701043448H1
attcgatggtgtcttgattcagattttgtcattggtttgtgctttttattttgtttcttaatctcgatttcaattcattgattttgtgttttgttcttgttattgtctctttggtgtaatagcatgttttagattcaaatattcgtgcacataaacacaatgctcccccctgtcggtggaggatttggcgtccctgccgttgctagacatggcggcggagaagcgaatcgaggggctggcgatgaaggtc

SEQ ID NO: 48626 - DNA, 260 bp, Glycine max
  Clone ID: 701043663H1
cgtcaacatctaacaccatacacacgcaacacgcttcagccactattcttcaaggaaaaacaaaatgaaagacacaatggaaactcctacgacactcaccaccttgctccgccacgtcgccgccaaattcccctcccgccgtgccatctccgtcgctgccaaattcgacctcacccactcccgcctccaccgcctggtcgaatccgccgccgctcagttagtctccgccggcgtcaaacccggcgacgtcgtcgcactca

SEQ ID NO: 48627 - DNA, 263 bp, Glycine max
  Clone ID: 701043665H1
cgcaggaaggtactttggtggagagaagattacatcaaaggaagtggaaatgggtagtccatggaagtcctgaacatcaaactttgacatcgattacacttgcgctgcaagatgaatcaagcgaaacattcatttctttattctttcctacttcaactggatctgtttttgagtatcaaatgccaaaacagttaggaactgttccaaacaatcagtttccaggagcatggggaagtcatgagcatcccttacatgcaaaagca

SEQ ID NO: 48628 - DNA, 250 bp, Glycine max
  Clone ID: 701043677H1
tttacagctatcgaagatggctcctcccagaggtcgtggtggtactcgtggtggtggtggtggtgggttcaggggtggtggtaggggtgacagaggcagaggcaggggcggtggaggacgaggaggagacagaggtacacccttcaaagctagaggcggtggtagaggtggtggaggccgtggaggaggcaggggtggtggccgtggcggtggcagaggtggaatgaagggtggtagcaaggttgttgtt

SEQ ID NO: 48629 - DNA, 116 bp, Glycine max
  Clone ID: 700967096H1
ctctcgagccgaatcggctcgagcgttttttcagcatatgtctcaaaggcccacggttcctatctcctcttccatagcctgcggccttcactctcatctcctggtctccagtgaga
